United States Patent Application Publication US 2026/0265778 A1, published September 10, 2026 (application 19/167,945).

The application's sequence listing, which the Patent Office published only in electronic form, follows.

SEQUENCE LISTING (6432 sequences)

SEQ ID NO: 1 - protein, 743 aa, synthetic construct
MAADGYLPDWLEDNLSEGIREWWALKPGAPQPKANQQHQDNARGLVLPGYKYLGPGNGLDKGEPVNAADAAALEHDKAYDQQLKAGDNPYLKYNHADAEFQERLKEDTSFGGNLGRAVFQAKKRLLEPLGLVEEAAKTAPGKKRPVEQSPQEPDSSAGIGKSGAQPAKKRLNFGQTGDTESVPDPQPIGEPPAAPSGVGSLTMASGGGAPVADNNEGADGVGSSSGNWHCDSQWLGDRVITTSTRTWALPTYNNHLYKQISNSTSGGSSNDNAYFGYSTPWGYFDFNRFHCHFSPRDWQRLINNNWGFRPKRLNFKLFNIQVKEVTDNNGVKTIANNLTSTVQVFTDSDYQLPYVLGSAHEGCLPPFPADVFMIPQYGYLTLNDGSQAVGRSSFYCLEYFPSQMLRTGNNFQFSYEFENVPFHSSYAHSQSLDRLMNPLIDQYLYYLSKTINGSGQNQQTLKFSVAGPSNMAVQGRNYIPGPSYRQQRVSTTVTQNNNSEFAWPGASSWALNGRNSLMNPGPAMASHKEGEDRFFPLSGSLIFGKQGTGRDNVDADKVMITNEEEIKTTNPVATESYGQVATNHQSDGTLAVPFKAQAQTGWVQNQGILPGMVWQDRDVYLQGPIWAKIPHTDGNFHPSPLMGGFGMKHPPPQILIKNTPVPADPPTAFNKDKLNSFITQYSTGQVSVEIEWELQKENSKRWNPEIQYTSNYYKSNNVEFAVNTEGVYSEPRPIGTRYLTRNL

SEQ ID NO: 2 - protein, 6 aa, synthetic construct
HDSPHK

SEQ ID NO: 3 - DNA, 18 bp, synthetic construct
  source 1..18: mol_type = other DNA
cacgacagcccacacaaa

SEQ ID NO: 4 - protein, 742 aa, synthetic construct
MAADGYLPDWLEDNLSEGIREWWALKPGAPQPKANQQHQDNARGLVLPGYKYLGPGNGLDKGEPVNAADAAALEHDKAYDQQLKAGDNPYLKYNHADAEFQERLKEDTSFGGNLGRAVFQAKKRLLEPLGLVEEAAKTAPGKKRPVEQSPQEPDSSAGIGKSGAQPAKKRLNFGQTGDTESVPDPQPIGEPPAAPSGVGSLTMASGGGAPVADNNEGADGVGSSSGNWHCDSQWLGDRVITTSTRTWALPTYNNHLYKQISNSTSGGSSNDNAYFGYSTPWGYFDFNRFHCHFSPRDWQRLINNNWGFRPKRLNFKLFNIQVKEVTDNNGVKTIANNLTSTVQVFTDSDYQLPYVLGSAHEGCLPPFPADVFMIPQYGYLTLNDGSQAVGRSSFYCLEYFPSQMLRTGNNFQFSYEFENVPFHSSYAHSQSLDRLMNPLIDQYLYYLSKTENVSGSPHSKAQNQQTLKFSVAGPSNMAVQGRNYIPGPSYRQQRVSTTVTQNNNSEFAWPGASSWALNGRNSLMNPGPAMASHKEGEDRFFPLSGSLIFGKQGTGRDNVDADKVMITNEEEIKTTNPVATESYGQVATNHQSAQAQAQTGWVQNQGILPGMVWQDRDVYLQGPIWAKIPHTDGNFHPSPLMGGFGMKHPPPQILIKNTPVPADPPTAFNKDKLNSFITQYSTGQVSVEIEWELQKENSKRWNPEIQYTSNYYKSNNVEFAVNTEGVYSEPRPIGTRYLTRNL

SEQ ID NO: 5 - DNA, 2226 bp, synthetic construct
  source 1..2226: mol_type = other DNA
atggctgccgatggttatcttccagattggctcgaggacaaccttagtgaaggaattcgcgagtggtgggctttgaaacctggagcccctcaacccaaggcaaatcaacaacatcaagacaacgctcgaggtcttgtgcttccgggttacaaataccttggacccggcaacggactcgacaagggggagccggtcaacgcagcagacgcggcggccctcgagcacgacaaggcctacgaccagcagctcaaggccggagacaacccgtacctcaagtacaaccacgccgacgccgagttccaggagcggctcaaagaagatacgtcttttgggggcaacctcgggcgagcagtcttccaggccaaaaagaggcttcttgaacctcttggtctggttgaggaagcggctaagacggctcctggaaagaagaggcctgtagagcagtctcctcaggaaccggactcctccgcgggtattggcaaatcgggtgcacagcccgctaaaaagagactcaatttcggtcagactggcgacacagagtcagtcccagaccctcaaccaatcggagaacctcccgcagccccctcaggtgtgggatctcttacaatggcttcaggtggtggcgcaccagtggcagacaataacgaaggtgccgatggagtgggtagttcctcgggaaattggcattgcgattcccaatggctgggggacagagtcatcaccaccagcacccgaacctgggccctgcccacctacaacaatcacctctacaagcaaatctccaacagcacatctggaggatcttcaaatgacaacgcctacttcggctacagcaccccctgggggtattttgacttcaacagattccactgccacttctcaccacgtgactggcagcgactcatcaacaacaactggggattccggcctaagcgactcaacttcaagctcttcaacattcaggtcaaagaggttacggacaacaatggagtcaagaccatcgccaataaccttaccagcacggtccaggtcttcacggactcagactatcagctcccgtacgtgctcgggtcggctcacgagggctgcctcccgccgttcccagcggacgttttcatgattcctcagtacgggtatctgacgcttaatgatggaagccaggccgtgggtcgttcgtccttttactgcctggaatatttcccgtcgcaaatgctaagaacgggtaacaacttccagttcagctacgagtttgagaacgtacctttccatagcagctacgctcacagccaaagcctggaccgactaatgaatccactcatcgaccaatacttgtactatctctctaagactgagaatgtgagcgggagccctcatagcaaggctcagaatcagcagactctaaaattcagtgtggccggacccagcaacatggctgtccagggaagaaactacatacctggacccagctaccgacaacaacgtgtctcaaccactgtgactcaaaacaacaacagcgaatttgcttggcctggagcttcttcttgggctctcaatggacgtaatagcttgatgaatcctggacctgctatggccagccacaaagaaggagaggaccgtttctttcctttgtctggatctttaatttttggcaaacaaggaactggaagagacaacgtggatgcggacaaagtcatgataaccaacgaagaagaaattaaaactactaacccggtagcaacggagtcctatggacaagtggccacaaaccaccagagtgcccaagcacaggcgcagaccggctgggttcaaaaccaaggaatacttccgggtatggtttggcaggacagagatgtgtacctgcaaggacccatttgggccaaaattcctcacacggacggcaactttcacccttctccgctgatgggagggtttggaatgaagcacccgcctcctcagatcctcatcaaaaacacacctgtacctgcggatcctccaacggccttcaacaaggacaagctgaactctttcatcacccagtattctactggccaagtcagcgtggagatcgagtgggagctgcagaaggaaaacagcaagcgctggaacccggagatccagtacacttccaactattacaagtctaataatgttgaatttgctgttaatactgaaggtgtatatagtgaaccccgccccattggcaccagatacctgactcgtaatctg

SEQ ID NO: 6-10 - skipped (5 entries)

SEQ ID NO: 11 - protein, 736 aa, synthetic construct
MAADGYLPDWLEDNLSEGIREWWALKPGAPQPKANQQHQDNARGLVLPGYKYLGPGNGLDKGEPVNAADAAALEHDKAYDQQLKAGDNPYLKYNHADAEFQERLKEDTSFGGNLGRAVFQAKKRLLEPLGLVEEAAKTAPGKKRPVEQSPQEPDSSAGIGKSGAQPAKKRLNFGQTGDTESVPDPQPIGEPPAAPSGVGSLTMASGGGAPVADNNEGADGVGSSSGNWHCDSQWLGDRVITTSTRTWALPTYNNHLYKQISNSTSGGSSNDNAYFGYSTPWGYFDFNRFHCHFSPRDWQRLINNNWGFRPKRLNFKLFNIQVKEVTDNNGVKTIANNLTSTVQVFTDSDYQLPYVLGSAHEGCLPPFPADVFMIPQYGYLTLNDGSQAVGRSSFYCLEYFPSQMLRTGNNFQFSYEFENVPFHSSYAHSQSLDRLMNPLIDQYLYYLSRTINGSGQNQQTLKFSVAGPSNMAVQGRNYIPGPSYRQQRVSTTVTQNNNSEFAWPGASSWALNGRNSLMNPGPAMASHKEGEDRFFPLSGSLIFGKQGTGRDNVDADKVMITNEEEIKTTNPVATESYGQVATNHQSAQAQAQTGWVQNQGILPGMVWQDRDVYLQGPIWAKIPHTDGNFHPSPLMGGFGMKHPPPQILIKNTPVPADPPTAFNKDKLNSFITQYSTGQVSVEIEWELQKENSKRWNPEIQYTSNYYKSNNVEFAVNTEGVYSEPRPIGTRYLTRNL

SEQ ID NO: 12 - DNA, 2226 bp, synthetic construct
  source 1..2226: mol_type = other DNA
atggctgccgatggttatcttccagattggctcgaggacaaccttagtgaaggaattcgcgagtggtgggctttgaaacctggagcccctcaacccaaggcaaatcaacaacatcaagacaacgctcgaggtcttgtgcttccgggttacaaataccttggacccggcaacggactcgacaagggggagccggtcaacgcagcagacgcggcggccctcgagcacgacaaggcctacgaccagcagctcaaggccggagacaacccgtacctcaagtacaaccacgccgacgccgagttccaggagcggctcaaagaagatacgtcttttgggggcaacctcgggcgagcagtcttccaggccaaaaagaggcttcttgaacctcttggtctggttgaggaagcggctaagacggctcctggaaagaagaggcctgtagagcagtctcctcaggaaccggactcctccgcgggtattggcaaatcgggtgcacagcccgctaaaaagagactcaatttcggtcagactggcgacacagagtcagtcccagaccctcaaccaatcggagaacctcccgcagccccctcaggtgtgggatctcttacaatggcttcaggtggtggcgcaccagtggcagacaataacgaaggtgccgatggagtgggtagttcctcgggaaattggcattgcgattcccaatggctgggggacagagtcatcaccaccagcacccgaacctgggccctgcccacctacaacaatcacctctacaagcaaatctccaacagcacatctggaggatcttcaaatgacaacgcctacttcggctacagcaccccctgggggtattttgacttcaacagattccactgccacttctcaccacgtgactggcagcgactcatcaacaacaactggggattccggcctaagcgactcaacttcaagctcttcaacattcaggtcaaagaggttacggacaacaatggagtcaagaccatcgccaataaccttaccagcacggtccaggtcttcacggactcagactatcagctcccgtacgtgctcgggtcggctcacgagggctgcctcccgccgttcccagcggacgttttcatgattcctcagtacgggtatctgacgcttaatgatggaagccaggccgtgggtcgttcgtccttttactgcctggaatatttcccgtcgcaaatgctaagaacgggtaacaacttccagttcagctacgagtttgagaacgtacctttccatagcagctacgctcacagccaaagcctggaccgactaatgaatccactcatcgatcagtatctgtattacttgagtaagacggagcgtgtgtctggttctccgcattctaaggcgcagaatcagcagacgttgaagttttcggtagctggtcctagcaacatggctgtccagggaagaaactacatacctggacccagctaccgacaacaacgtgtctcaaccactgtgactcaaaacaacaacagcgaatttgcttggcctggagcttcttcttgggctctcaatggacgtaatagcttgatgaatcctggacctgctatggccagccacaaagaaggagaggaccgtttctttcctttgtctggatctttaatttttggcaaacaaggaactggaagagacaacgtggatgcggacaaagtcatgataaccaacgaagaagaaattaaaactactaacccggtagcaacggagtcctatggacaagtggccacaaaccaccagagtgcccaagcacaggcgcagaccggctgggttcaaaaccaaggaatacttccgggtatggtttggcaggacagagatgtgtacctgcaaggacccatttgggccaaaattcctcacacggacggcaactttcacccttctccgctgatgggagggtttggaatgaagcacccgcctcctcagatcctcatcaaaaacacacctgtacctgcggatcctccaacggccttcaacaaggacaagctgaactctttcatcacccagtattctactggccaagtcagcgtggagatcgagtgggagctgcagaaggaaaacagcaagcgctggaacccggagatccagtacacttccaactattacaagtctaataatgttgaatttgctgttaatactgaaggtgtatatagtgaaccccgccccattggcacgcggtatttaacgaggaactta

SEQ ID NO: 13 - DNA, 2226 bp, synthetic construct
  source 1..2226: mol_type = other DNA
atggctgccgatggttatcttccagattggctcgaggacaaccttagtgaaggaattcgcgagtggtgggctttgaaacctggagcccctcaacccaaggcaaatcaacaacatcaagacaacgctcgaggtcttgtgcttccgggttacaaataccttggacccggcaacggactcgacaagggggagccggtcaacgcagcagacgcggcggccctcgagcacgacaaggcctacgaccagcagctcaaggccggagacaacccgtacctcaagtacaaccacgccgacgccgagttccaggagcggctcaaagaagatacgtcttttgggggcaacctcgggcgagcagtcttccaggccaaaaagaggcttcttgaacctcttggtctggttgaggaagcggctaagacggctcctggaaagaagaggcctgtagagcagtctcctcaggaaccggactcctccgcgggtattggcaaatcgggtgcacagcccgctaaaaagagactcaatttcggtcagactggcgacacagagtcagtcccagaccctcaaccaatcggagaacctcccgcagccccctcaggtgtgggatctcttacaatggcttcaggtggtggcgcaccagtggcagacaataacgaaggtgccgatggagtgggtagttcctcgggaaattggcattgcgattcccaatggctgggggacagagtcatcaccaccagcacccgaacctgggccctgcccacctacaacaatcacctctacaagcaaatctccaacagcacatctggaggatcttcaaatgacaacgcctacttcggctacagcaccccctgggggtattttgacttcaacagattccactgccacttctcaccacgtgactggcagcgactcatcaacaacaactggggattccggcctaagcgactcaacttcaagctcttcaacattcaggtcaaagaggttacggacaacaatggagtcaagaccatcgccaataaccttaccagcacggtccaggtcttcacggactcagactatcagctcccgtacgtgctcgggtcggctcacgagggctgcctcccgccgttcccagcggacgttttcatgattcctcagtacgggtatctgacgcttaatgatggaagccaggccgtgggtcgttcgtccttttactgcctggaatatttcccgtcgcaaatgctaagaacgggtaacaacttccagttcagctacgagtttgagaacgtacctttccatagcagctacgctcacagccaaagcctggaccgactaatgaatccactcatcgatcagtatctgtattacttgagtaaggcggagattggtcatgattctccgcataagtctggtcagaatcagcagacgttgaagttttcggtagctggtcctagcaacatggctgtccagggaagaaactacatacctggacccagctaccgacaacaacgtgtctcaaccactgtgactcaaaacaacaacagcgaatttgcttggcctggagcttcttcttgggctctcaatggacgtaatagcttgatgaatcctggacctgctatggccagccacaaagaaggagaggaccgtttctttcctttgtctggatctttaatttttggcaaacaaggaactggaagagacaacgtggatgcggacaaagtcatgataaccaacgaagaagaaattaaaactactaacccggtagcaacggagtcctatggacaagtggccacaaaccaccagagtgcccaagcacaggcgcagaccggctgggttcaaaaccaaggaatacttccgggtatggtttggcaggacagagatgtgtacctgcaaggacccatttgggccaaaattcctcacacggacggcaactttcacccttctccgctgatgggagggtttggaatgaagcacccgcctcctcagatcctcatcaaaaacacacctgtacctgcggatcctccaacggccttcaacaaggacaagctgaactctttaatcacccagtattctactggccaagtcagcgtggagatcgagtgggagctgcagaaggaaaacagcaagcgctggaacccggagatccagtacacttccaactattacaagtctaataatgttgaatttgctgttaatactgaaggtgtatatagtgaaccccgccccattggcacgcggtatttaacgaggaactta

SEQ ID NO: 14 - DNA, 2226 bp, synthetic construct
  source 1..2226: mol_type = other DNA
atggctgccgatggttatcttccagattggctcgaggacaaccttagtgaaggaattcgcgagtggtgggctttgaaacctggagcccctcaacccaaggcaaatcaacaacatcaagacaacgctcgaggtcttgtgcttccgggttacaaataccttggacccggcaacggactcgacaagggggagccggtcaacgcagcagacgcggcggccctcgagcacgacaaggcctacgaccagcagctcaaggccggagacaacccgtacctcaagtacaaccacgccgacgccgagttccaggagcggctcaaagaagatacgtcttttgggggcaacctcgggcgagcagtcttccaggccaaaaagaggcttcttgaacctcttggtctggttgaggaagcggctaagacggctcctggaaagaagaggcctgtagagcagtctcctcaggaaccggactcctccgcgggtattggcaaatcgggtgcacagcccgctaaaaagagactcaatttcggtcagactggcgacacagagtcagtcccagaccctcaaccaatcggagaacctcccgcagccccctcaggtgtgggatctcttacaatggcttcaggtggtggcgcaccagtggcagacaataacgaaggtgccgatggagtgggtagttcctcgggaaattggcattgcgattcccaatggctgggggacagagtcatcaccaccagcacccgaacctgggccctgcccacctacaacaatcacctctacaagcaaatctccaacagcacatctggaggatcttcaaatgacaacgcctacttcggctacagcaccccctgggggtattttgacttcaacagattccactgccacttctcaccacgtgactggcagcgactcatcaacaacaactggggattccggcctaagcgactcaacttcaagctcttcaacattcaggtcaaagaggttacggacaacaatggagtcaagaccatcgccaataaccttaccagcacggtccaggtcttcacggactcagactatcagctcccgtacgtgctcgggtcggctcacgagggctgcctcccgccgttcccagcggacgttttcatgattcctcagtacgggtatctgacgcttaatgatggaagccaggccgtgggtcgttcgtccttttactgcctggaatatttcccgtcgcaaatgctaagaacgggtaacaacttccagttcagctacgagtttgagaacgtacctttccatagcagctacgctcacagccaaagcctggaccgactaatgaatccactcatcgatcagtatctgtattacttgagtaagacgattattggttctggttctccgcattctaaggcgcagaatcgtcatacgttgaagttttcggtagctggtcctagcaacatggctgtccagggaagaaactacatacctggacccagctaccgacaacaacgtgtctcaaccactgtgactcaaaacaacaacagcgaatttgcttggcctggagcttcttcttgggctctcaatggacgtaatagcttgatgaatcctggacctgctatggccagccacaaagaaggagaggaccgtttctttcctttgtctggatctttaatttttggcaaacaaggaactggaagagacaacgtggatgcggacaaagtcatgataaccaacgaagaagaaattaaaactactaacccggtagcaacggagtcctatggacaagtggccacaaaccaccagagtgcccaagcacaggcgcagaccggctgggttcaaaaccaaggaatacttccgggtatggtttggcaggacagagatgtgtacctgcaaggacccatttgggccaaaattcctcacacggacggcaactttcacccttctccgctgatgggagggtttggaatgaagcacccgcctcctcagatcctcatcaaaaacacacctgtacctgcggatcctccaacggccttcaacaaggacaagctgaactctttcatcacccagtattctactggccaagtcagcgtggagatcgagtgggagctgcagaaggaaaacagcaagcgctggaacccggagatccagtacacttccaactattacaagtctaataatgttgaatttgctgttaatactgaaggtgtatatagtgaaccccgccccattggcacgcggtatttaacgaggaactta

SEQ ID NO: 15 - DNA, 2226 bp, synthetic construct
  source 1..2226: mol_type = other DNA
atggctgccgatggttatcttccagattggctcgaggacaaccttagtgaaggaattcgcgagtggtgggctttgaaacctggagcccctcaacccaaggcaaatcaacaacatcaagacaacgctcgaggtcttgtgcttccgggttacaaataccttggacccggcaacggactcgacaagggggagccggtcaacgcagcagacgcggcggccctcgagcacgacaaggcctacgaccagcagctcaaggccggagacaacccgtacctcaagtacaaccacgccgacgccgagttccaggagcggctcaaagaagatacgtcttttgggggcaacctcgggcgagcagtcttccaggccaaaaagaggcttcttgaacctcttggtctggttgaggaagcggctaagacggctcctggaaagaagaggcctgtagagcagtctcctcaggaaccggactcctccgcgggtattggcaaatcgggtgcacagcccgctaaaaagagactcaatttcggtcagactggcgacacagagtcagtcccagaccctcaaccaatcggagaacctcccgcagccccctcaggtgtgggatctcttacaatggcttcaggtggtggcgcaccagtggcagacaataacgaaggtgccgatggagtgggtagttcctcgggaaattggcattgcgattcccaatggctgggggacagagtcatcaccaccagcacccgaacctgggccctgcccacctacaacaatcacctctacaagcaaatctccaacagcacatctggaggatcttcaaatgacaacgcctacttcggctacagcaccccctgggggtattttgacttcaacagattccactgccacttctcaccacgtgactggcagcgactcatcaacaacaactggggattccggcctaagcgactcaacttcaagctcttcaacattcaggtcaaagaggttacggacaacaatggagtcaagaccatcgccaataaccttaccagcacggtccaggtcttcacggactcagactatcagctcccgtacgtgctcgggtcggctcacgagggctgcctcccgccgttcccagcggacgttttcatgattcctcagtacgggtatctgacgcttaatgatggaagccaggccgtgggtcgttcgtccttttactgcctggaatatttcccgtcgcaaatgctaagaacgggtaacaacttccagttcagctacgagtttgagaacgtacctttccatagcagctacgctcacagccaaagcctggaccgactaatgaatccactcatcgatcagtatctgtattacttgagtaagacggagaagatgtctggttctccgcattctaaggcgcagaatcagcagacgttgaagttttcggtagctggtcctagcaacatggctgtccagggaagaaactacatacctggacccagctaccgacaacaacgtgtctcaaccactgtgactcaaaacaacaacagcgaatttgcttggcctggagcttcttcttgggctctcaatggacgtaatagcttgatgaatcctggacctgctatggccagccacaaagaaggagaggaccgtttctttcctttgtctggatctttaatttttggcaaacaaggaactggaagagacaacgtggatgcggacaaagtcatgataaccaacgaagaagaaattaaaactactaacccggtagcaacggagtcctatggacaagtggccacaaaccaccagagtgcccaagcacaggcgcagaccggctgggttcaaaaccaaggaatacttccgggtatggtttggcaggacagagatgtgtacctgcaaggacccatttgggccaaaattcctcacacggacggcaactttcacccttctccgctgatgggagggtttggaatgaagcacccgcctcctcagatcctcatcaaaaacacacctgtacctgcggatcctccaacggccttcaacaaggacaagctgaactctttcatcacccagtattctactggccaagtcagcgtggagatcgagtgggagctgcagaaggaaaacagcaagcgctggaacccggagatccagtacacttccaactattacaagtctaataatgttgaatttgctgttaatactgaaggtgtatatagtgaaccccgccccattggcacgcggtatttaacgaggaactta

SEQ ID NO: 16 - DNA, 2226 bp, synthetic construct
  source 1..2226: mol_type = other DNA
atggctgccgatggttatcttccagattggctcgaggacaaccttagtgaaggaattcgcgagtggtgggctttgaaacctggagcccctcaacccaaggcaaatcaacaacatcaagacaacgctcgaggtcttgtgcttccgggttacaaataccttggacccggcaacggactcgacaagggggagccggtcaacgcagcagacgcggcggccctcgagcacgacaaggcctacgaccagcagctcaaggccggagacaacccgtacctcaagtacaaccacgccgacgccgagttccaggagcggctcaaagaagatacgtcttttgggggcaacctcgggcgagcagtcttccaggccaaaaagaggcttcttgaacctcttggtctggttgaggaagcggctaagacggctcctggaaagaagaggcctgtagagcagtctcctcaggaaccggactcctccgcgggtattggcaaatcgggtgcacagcccgctaaaaagagactcaatttcggtcagactggcgacacagagtcagtcccagaccctcaaccaatcggagaacctcccgcagccccctcaggtgtgggatctcttacaatggcttcaggtggtggcgcaccagtggcagacaataacgaaggtgccgatggagtgggtagttcctcgggaaattggcattgcgattcccaatggctgggggacagagtcatcaccaccagcacccgaacctgggccctgcccacctacaacaatcacctctacaagcaaatctccaacagcacatctggaggatcttcaaatgacaacgcctacttcggctacagcaccccctgggggtattttgacttcaacagattccactgccacttctcaccacgtgactggcagcgactcatcaacaacaactggggattccggcctaagcgactcaacttcaagctcttcaacattcaggtcaaagaggttacggacaacaatggagtcaagaccatcgccaataaccttaccagcacggtccaggtcttcacggactcagactatcagctcccgtacgtgctcgggtcggctcacgagggctgcctcccgccgttcccagcggacgttttcatgattcctcagtacgggtatctgacgcttaatgatggaagccaggccgtgggtcgttcgtccttttactgcctggaatatttcccgtcgcaaatgctaagaacgggtaacaacttccagttcagctacgagtttgagaacgtacctttccatagcagctacgctcacagccaaagcctggaccgactaatgaatccactcatcgatcagtatctgtattacttgagtaaggagattaatggtcgtggttctccgcattctaaggcgcagaatcagcagacgttgaagttttcggtagctggtcctagcaacatggctgtccagggaagaaactacatacctggacccagctaccgacaacaacgtgtctcaaccactgtgactcaaaacaacaacagcgaatttgcttggcctggagcttcttcttgggctctcaatggacgtaatagcttgatgaatcctggacctgctatggccagccacaaagaaggagaggaccgtttctttcctttgtctggatctttaatttttggcaaacaaggaactggaagagacaacgtggatgcggacaaagtcatgataaccaacgaagaagaaattaaaactactaacccggtagcaacggagtcctatggacaagtggccacaaaccaccagagtgcccaagcacaggcgcagaccggctgggttcaaaaccaaggaatacttccgggtatggtttggcaggacagagatgtgtacctgcaaggacccatttgggccaaaattcctcacacggacggcaactttcacccttctccgctgatgggagggtttggaatgaagcacccgcctcctcagatcctcatcaaaaacacacctgtacctgcggatcctccaacggccttcaacaaggacaagctgaactctttcatcacccagtattctactggccaagtcagcgtggagatcgagtgggagctgcagaaggaaaacagcaagcgctggaacccggagatccagtacacttccaactattacaagtctaataatgttgaatttgctgttaatactgaaggtgtatatagtgaaccccgccccattggcacgcggtatttaacgaggaactta

SEQ ID NO: 17 - DNA, 2226 bp, synthetic construct
  source 1..2226: mol_type = other DNA
atggctgccgatggttatcttccagattggctcgaggacaaccttagtgaaggaattcgcgagtggtgggctttgaaacctggagcccctcaacccaaggcaaatcaacaacatcaagacaacgctcgaggtcttgtgcttccgggttacaaataccttggacccggcaacggactcgacaagggggagccggtcaacgcagcagacgcggcggccctcgagcacgacaaggcctacgaccagcagctcaaggccggagacaacccgtacctcaagtacaaccacgccgacgccgagttccaggagcggctcaaagaagatacgtcttttgggggcaacctcgggcgagcagtcttccaggccaaaaagaggcttcttgaacctcttggtctggttgaggaagcggctaagacggctcctggaaagaagaggcctgtagagcagtctcctcaggaaccggactcctccgcgggtattggcaaatcgggtgcacagcccgctaaaaagagactcaatttcggtcagactggcgacacagagtcagtcccagaccctcaaccaatcggagaacctcccgcagccccctcaggtgtgggatctcttacaatggcttcaggtggtggcgcaccagtggcagacaataacgaaggtgccgatggagtgggtagttcctcgggaaattggcattgcgattcccaatggctgggggacagagtcatcaccaccagcacccgaacctgggccctgcccacctacaacaatcacctctacaagcaaatctccaacagcacatctggaggatcttcaaatgacaacgcctacttcggctacagcaccccctgggggtattttgacttcaacagattccactgccacttctcaccacgtgactggcagcgactcatcaacaacaactggggattccggcctaagcgactcaacttcaagctcttcaacattcaggtcaaagaggttacggacaacaatggagtcaagaccatcgccaataaccttaccagcacggtccaggtcttcacggactcagactatcagctcccgtacgtgctcgggtcggctcacgagggctgcctcccgccgttcccagcggacgttttcatgattcctcagtacgggtatctgacgcttaatgatggaagccaggccgtgggtcgttcgtccttttactgcctggaatatttcccgtcgcaaatgctaagaacgggtaacaacttccagttcagctacgagtttgagaacgtacctttccatagcagctacgctcacagccaaagcctggaccgactaatgaatccactcatcgatcagtatctgtattacttgagtaagacgtttaatggttctggttctccgcattctaaggcgccgaatctgcagacgttgaagttttcggtagctggtcctagcaacatggctgtccagggaagaaactacatacctggacccagctaccgacaacaacgtgtctcaaccactgtgactcaaaacaacaacagcgaatttgcttggcctggagcttcttcttgggctctcaatggacgtaatagcttgatgaatcctggacctgctatggccagccacaaagaaggagaggaccgtttctttcctttgtctggatctttaatttttggcaaacaaggaactggaagagacaacgtggatgcggacaaagtcatgataaccaacgaagaagaaattaaaactactaacccggtagcaacggagtcctatggacaagtggccacaaaccaccagagtgcccaagcacaggcgcagaccggctgggttcaaaaccaaggaatacttccgggtatggtttggcaggacagagatgtgtacctgcaaggacccatttgggccaaaattcctcacacggacggcaactttcacccttctccgctgatgggagggtttggaatgaagcacccgcctcctcagatcctcatcaaaaacacacctgtacctgcggatcctccaacggccttcaacaaggacaagctgaactctttcatcacccagtattctactggccaagtcagcgtggagatcgagtgggagctgcagaaggaaaacagcaagcgctggaacccggagatccagtacacttccaactattacaagtctaataatgttgaatttgctgttaatactgaaggtgtatatagtgaaccccgccccattggcacgcggtatttaacgaggaactta

SEQ ID NO: 18 - DNA, 2226 bp, synthetic construct
  source 1..2226: mol_type = other DNA
atggctgccgatggttatcttccagattggctcgaggacaaccttagtgaaggaattcgcgagtggtgggctttgaaacctggagcccctcaacccaaggcaaatcaacaacatcaagacaacgctcgaggtcttgtgcttccgggttacaaataccttggacccggcaacggactcgacaagggggagccggtcaacgcagcagacgcggcggccctcgagcacgacaaggcctacgaccagcagctcaaggccggagacaacccgtacctcaagtacaaccacgccgacgccgagttccaggagcggctcaaagaagatacgtcttttgggggcaacctcgggcgagcagtcttccaggccaaaaagaggcttcttgaacctcttggtctggttgaggaagcggctaagacggctcctggaaagaagaggcctgtagagcagtctcctcaggaaccggactcctccgcgggtattggcaaatcgggtgcacagcccgctaaaaagagactcaatttcggtcagactggcgacacagagtcagtcccagaccctcaaccaatcggagaacctcccgcagccccctcaggtgtgggatctcttacaatggcttcaggtggtggcgcaccagtggcagacaataacgaaggtgccgatggagtgggtagttcctcgggaaattggcattgcgattcccaatggctgggggacagagtcatcaccaccagcacccgaacctgggccctgcccacctacaacaatcacctctacaagcaaatctccaacagcacatctggaggatcttcaaatgacaacgcctacttcggctacagcaccccctgggggtattttgacttcaacagattccactgccacttctcaccacgtgactggcagcgactcatcaacaacaactggggattccggcctaagcgactcaacttcaagctcttcaacattcaggtcaaagaggttacggacaacaatggagtcaagaccatcgccaataaccttaccagcacggtccaggtcttcacggactcagactatcagctcccgtacgtgctcgggtcggctcacgagggctgcctcccgccgttcccagcggacgttttcatgattcctcagtacgggtatctgacgcttaatgatggaagccaggccgtgggtcgttcgtccttttactgcctggaatatttcccgtcgcaaatgctaagaacgggtaacaacttccagttcagctacgagtttgagaacgtacctttccatagcagctacgctcacagccaaagcctggaccgactaatgaatccactcatcgatcagtatctgtattacttgagtaagacggagaagacgtctggttctccgcattctaaggcgcagaatcagcagacgttgaagttttcggtagctggtcctagcaacatggctgtccagggaagaaactacatacctggacccagctaccgacaacaacgtgtctcaaccactgtgactcaaaacaacaacagcgaatttgcttggcctggagcttcttcttgggctctcaatggacgtaatagcttgatgaatcctggacctgctatggccagccacaaagaaggagaggaccgtttctttcctttgtctggatctttaatttttggcaaacaaggaactggaagagacaacgtggatgcggacaaagtcatgataaccaacgaagaagaaattaaaactactaacccggtagcaacggagtcctatggacaagtggccacaaaccaccagagtgcccaagcacaggcgcagaccggctgggttcaaaaccaaggaatacttccgggtatggtttggcaggacagagatgtgtacctgcaaggacccatttgggccaaaattcctcacacggacggcaactttcacccttctccgctgatgggagggtttggaatgaagcacccgcctcctcagatcctcatcaaaaacacacctgtacctgcggatcctccaacggccttcaacaaggacaagctgaactctttcatcacccagtattctactggccaagtcagcgtggagatcgagtgggagctgcagaaggaaaacagcaagcgctggaacccggagatccagtacacttccaactattacaagtctaataatgttgaatttgctgttaatactgaaggtgtatatagtgaaccccgccccattggcacgcggtatttaacgaggaactta

SEQ ID NO: 19 - DNA, 2226 bp, synthetic construct
  source 1..2226: mol_type = other DNA
atggctgccgatggttatcttccagattggctcgaggacaaccttagtgaaggaattcgcgagtggtgggctttgaaacctggagcccctcaacccaaggcaaatcaacaacatcaagacaacgctcgaggtcttgtgcttccgggttacaaataccttggacccggcaacggactcgacaagggggagccggtcaacgcagcagacgcggcggccctcgagcacgacaaggcctacgaccagcagctcaaggccggagacaacccgtacctcaagtacaaccacgccgacgccgagttccaggagcggctcaaagaagatacgtcttttgggggcaacctcgggcgagcagtcttccaggccaaaaagaggcttcttgaacctcttggtctggttgaggaagcggctaagacggctcctggaaagaagaggcctgtagagcagtctcctcaggaaccggactcctccgcgggtattggcaaatcgggtgcacagcccgctaaaaagagactcaatttcggtcagactggcgacacagagtcagtcccagaccctcaaccaatcggagaacctcccgcagccccctcaggtgtgggatctcttacaatggcttcaggtggtggcgcaccagtggcagacaataacgaaggtgccgatggagtgggtagttcctcgggaaattggcattgcgattcccaatggctgggggacagagtcatcaccaccagcacccgaacctgggccctgcccacctacaacaatcacctctacaagcaaatctccaacagcacatctggaggatcttcaaatgacaacgcctacttcggctacagcaccccctgggggtattttgacttcaacagattccactgccacttctcaccacgtgactggcagcgactcatcaacaacaactggggattccggcctaagcgactcaacttcaagctcttcaacattcaggtcaaagaggttacggacaacaatggagtcaagaccatcgccaataaccttaccagcacggtccaggtcttcacggactcagactatcagctcccgtacgtgctcgggtcggctcacgagggctgcctcccgccgttcccagcggacgttttcatgattcctcagtacgggtatctgacgcttaatgatggaagccaggccgtgggtcgttcgtccttttactgcctggaatatttcccgtcgcaaatgctaagaacgggtaacaacttccagttcagctacgagtttgagaacgtacctttccatagcagctacgctcacagccaaagcctggaccgactaatgaatccactcatcgatcagtatctgtattacttgagtaagacgatgaatggtcatgattctccgcattctaaggcgcagaatcagcagacgttgaagttttcggtagctggtcctagcaacatggctgtccagggaagaaactacatacctggacccagctaccgacaacaacgtgtctcaaccactgtgactcaaaacaacaacagcgaatttgcttggcctggagcttcttcttgggctctcaatggacgtaatagcttgatgaatcctggacctgctatggccagccacaaagaaggagaggaccgtttctttcctttgtctggatctttaatttttggcaaacaaggaactggaagagacaacgtggatgcggacaaagtcatgataaccaacgaagaagaaattaaaactactaacccggtagcaacggagtcctatggacaagtggccacaaaccaccagagtgcccaagcacaggcgcagaccggctgggttcaaaaccaaggaatacttccgggtatggtttggcaggacagagatgtgtacctgcaaggacccatttgggccaaaattcctcacacggacggcaactttcacccttctccgctgatgggagggtttggaatgaagcacccgcctcctcagatcctcatcaaaaacacacctgtacctgcggatcctccaacggccttcaacaaggacaagctgaactctttcatcacccagtattctactggccaagtcagcgtggagatcgagtgggagctgcagaaggaaaacagcaagcgctggaacccggagatccagtacacttccaactattacaagtctaataatgttgaatttgctgttaatactgaaggtgtatatagtgaaccccgccccattggcacgcggtatttaacgaggaactta

SEQ ID NO: 20 - DNA, 2226 bp, synthetic construct
  source 1..2226: mol_type = other DNA
atggctgccgatggttatcttccagattggctcgaggacaaccttagtgaaggaattcgcgagtggtgggctttgaaacctggagcccctcaacccaaggcaaatcaacaacatcaagacaacgctcgaggtcttgtgcttccgggttacaaataccttggacccggcaacggactcgacaagggggagccggtcaacgcagcagacgcggcggccctcgagcacgacaaggcctacgaccagcagctcaaggccggagacaacccgtacctcaagtacaaccacgccgacgccgagttccaggagcggctcaaagaagatacgtcttttgggggcaacctcgggcgagcagtcttccaggccaaaaagaggcttcttgaacctcttggtctggttgaggaagcggctaagacggctcctggaaagaagaggcctgtagagcagtctcctcaggaaccggactcctccgcgggtattggcaaatcgggtgcacagcccgctaaaaagagactcaatttcggtcagactggcgacacagagtcagtcccagaccctcaaccaatcggagaacctcccgcagccccctcaggtgtgggatctcttacaatggcttcaggtggtggcgcaccagtggcagacaataacgaaggtgccgatggagtgggtagttcctcgggaaattggcattgcgattcccaatggctgggggacagagtcatcaccaccagcacccgaacctgggccctgcccacctacaacaatcacctctacaagcaaatctccaacagcacatctggaggatcttcaaatgacaacgcctacttcggctacagcaccccctgggggtattttgacttcaacagattccactgccacttctcaccacgtgactggcagcgactcatcaacaacaactggggattccggcctaagcgactcaacttcaagctcttcaacattcaggtcaaagaggttacggacaacaatggagtcaagaccatcgccaataaccttaccagcacggtccaggtcttcacggactcagactatcagctcccgtacgtgctcgggtcggctcacgagggctgcctcccgccgttcccagcggacgttttcatgattcctcagtacgggtatctgacgcttaatgatggaagccaggccgtgggtcgttcgtccttttactgcctggaatatttcccgtcgcaaatgctaagaacgggtaacaacttccagttcagctacgagtttgagaacgtacctttccatagcagctacgctcacagccaaagcctggaccgactaatgaatccactcatcgatcagtatctgtattacttgagtaagacgattgatggtcatgattctccgcattctaaggcgcagaatcagcagacgttgaagttttcggtagctggtcctagcaacatggctgtccagggaagaaactacatacctggacccagctaccgacaacaacgtgtctcaaccactgtgactcaaaacaacaacagcgaatttgcttggcctggagcttcttcttgggctctcaatggacgtaatagcttgatgaatcctggacctgctatggccagccacaaagaaggagaggaccgtttctttcctttgtctggatctttaatttttggcaaacaaggaactggaagagacaacgtggatgcggacaaagtcatgataaccaacgaagaagaaattaaaactactaacccggtagcaacggagtcctatggacaagtggccacaaaccaccagagtgcccaagcacaggcgcagaccggctgggttcaaaaccaaggaatacttccgggtatggtttggcaggacagagatgtgtacctgcaaggacccatttgggccaaaattcctcacacggacggcaactttcacccttctccgctgatgggagggtttggaatgaagcacccgcctcctcagatcctcatcaaaaacacacctgtacctgcggatcctccaacggccttcaacaaggacaagctgaactctttcatcacccagtattctactggccaagtcagcgtggagatcgagtgggagctgcagaaggaaaacagcaagcgctggaacccggagatccagtacacttccaactattacaagtctaataatgttgaatttgctgttaatactgaaggtgtatatagtgaaccccgccccattggcacgcggtatttaacgaggaactta

SEQ ID NO: 21 - DNA, 2226 bp, synthetic construct
  source 1..2226: mol_type = other DNA
atggctgccgatggttatcttccagattggctcgaggacaaccttagtgaaggaattcgcgagtggtgggctttgaaacctggagcccctcaacccaaggcaaatcaacaacatcaagacaacgctcgaggtcttgtgcttccgggttacaaataccttggacccggcaacggactcgacaagggggagccggtcaacgcagcagacgcggcggccctcgagcacgacaaggcctacgaccagcagctcaaggccggagacaacccgtacctcaagtacaaccacgccgacgccgagttccaggagcggctcaaagaagatacgtcttttgggggcaacctcgggcgagcagtcttccaggccaaaaagaggcttcttgaacctcttggtctggttgaggaagcggctaagacggctcctggaaagaagaggcctgtagagcagtctcctcaggaaccggactcctccgcgggtattggcaaatcgggtgcacagcccgctaaaaagagactcaatttcggtcagactggcgacacagagtcagtcccagaccctcaaccaatcggagaacctcccgcagccccctcaggtgtgggatctcttacaatggcttcaggtggtggcgcaccagtggcagacaataacgaaggtgccgatggagtgggtagttcctcgggaaattggcattgcgattcccaatggctgggggacagagtcatcaccaccagcacccgaacctgggccctgcccacctacaacaatcacctctacaagcaaatctccaacagcacatctggaggatcttcaaatgacaacgcctacttcggctacagcaccccctgggggtattttgacttcaacagattccactgccacttctcaccacgtgactggcagcgactcatcaacaacaactggggattccggcctaagcgactcaacttcaagctcttcaacattcaggtcaaagaggttacggacaacaatggagtcaagaccatcgccaataaccttaccagcacggtccaggtcttcacggactcagactatcagctcccgtacgtgctcgggtcggctcacgagggctgcctcccgccgttcccagcggacgttttcatgattcctcagtacgggtatctgacgcttaatgatggaagccaggccgtgggtcgttcgtccttttactgcctggaatatttcccgtcgcaaatgctaagaacgggtaacaacttccagttcagctacgagtttgagaacgtacctttccatagcagctacgctcacagccaaagcctggaccgactaatgaatccactcatcgatcagtatctgtattacttgagtaagacgaataatggtcatgattctccgcattctaaggcgcagaatcagcagacgttgaagttttcggtagctggtcctagcaacatggctgtccagggaagaaactacatacctggacccagctaccgacaacaacgtgtctcaaccactgtgactcaaaacaacaacagcgaatttgcttggcctggagcttcttcttgggctctcaatggacgtaatagcttgatgaatcctggacctgctatggccagccacaaagaaggagaggaccgtttctttcctttgtctggatctttaatttttggcaaacaaggaactggaagagacaacgtggatgcggacaaagtcatgataaccaacgaagaagaaattaaaactactaacccggtagcaacggagtcctatggacaagtggccacaaaccaccagagtgcccaagcacaggcgcagaccggctgggttcaaaaccaaggaatacttccgggtatggtttggcaggacagagatgtgtacctgcaaggacccatttgggccaaaattcctcacacggacggcaactttcacccttctccgctgatgggagggtttggaatgaagcacccgcctcctcagatcctcatcaaaaacacacctgtacctgcggatcctccaacggccttcaacaaggacaagctgaactctttcatcacccagtattctactggccaagtcagcgtggagatcgagtgggagctgcagaaggaaaacagcaagcgctggaacccggagatccagtacacttccaactattacaagtctaataatgttgaatttgctgttaatactgaaggtgtatatagtgaaccccgccccattggcacgcggtatttaacgaggaactta

SEQ ID NO: 22 - DNA, 2226 bp, synthetic construct
  source 1..2226: mol_type = other DNA
atggctgccgatggttatcttccagattggctcgaggacaaccttagtgaaggaattcgcgagtggtgggctttgaaacctggagcccctcaacccaaggcaaatcaacaacatcaagacaacgctcgaggtcttgtgcttccgggttacaaataccttggacccggcaacggactcgacaagggggagccggtcaacgcagcagacgcggcggccctcgagcacgacaaggcctacgaccagcagctcaaggccggagacaacccgtacctcaagtacaaccacgccgacgccgagttccaggagcggctcaaagaagatacgtcttttgggggcaacctcgggcgagcagtcttccaggccaaaaagaggcttcttgaacctcttggtctggttgaggaagcggctaagacggctcctggaaagaagaggcctgtagagcagtctcctcaggaaccggactcctccgcgggtattggcaaatcgggtgcacagcccgctaaaaagagactcaatttcggtcagactggcgacacagagtcagtcccagaccctcaaccaatcggagaacctcccgcagccccctcaggtgtgggatctcttacaatggcttcaggtggtggcgcaccagtggcagacaataacgaaggtgccgatggagtgggtagttcctcgggaaattggcattgcgattcccaatggctgggggacagagtcatcaccaccagcacccgaacctgggccctgcccacctacaacaatcacctctacaagcaaatctccaacagcacatctggaggatcttcaaatgacaacgcctacttcggctacagcaccccctgggggtattttgacttcaacagattccactgccacttctcaccacgtgactggcagcgactcatcaacaacaactggggattccggcctaagcgactcaacttcaagctcttcaacattcaggtcaaagaggttacggacaacaatggagtcaagaccatcgccaataaccttaccagcacggtccaggtcttcacggactcagactatcagctcccgtacgtgctcgggtcggctcacgagggctgcctcccgccgttcccagcggacgttttcatgattcctcagtacgggtatctgacgcttaatgatggaagccaggccgtgggtcgttcgtccttttactgcctggaatatttcccgtcgcaaatgctaagaacgggtaacaacttccagttcagctacgagtttgagaacgtacctttccatagcagctacgctcacagccaaagcctggaccgactaatgaatccactcatcgatcagtatctgtattacttgagtaagacgcagcgtaagtctggttctccgcattctaaggcgcagaatcagcagacgttgaagttttcggtagctggtcctagcaacatggctgtccagggaagaaactacatacctggacccagctaccgacaacaacgtgtctcaaccactgtgactcaaaacaacaacagcgaatttgcttggcctggagcttcttcttgggctctcaatggacgtaatagcttgatgaatcctggacctgctatggccagccacaaagaaggagaggaccgtttctttcctttgtctggatctttaatttttggcaaacaaggaactggaagagacaacgtggatgcggacaaagtcatgataaccaacgaagaagaaattaaaactactaacccggtagcaacggagtcctatggacaagtggccacaaaccaccagagtgcccaagcacaggcgcagaccggctgggttcaaaaccaaggaatacttccgggtatggtttggcaggacagagatgtgtacctgcaaggacccatttgggccaaaattcctcacacggacggcaactttcacccttctccgctgatgggagggtttggaatgaagcacccgcctcctcagatcctcatcaaaaacacacctgtacctgcggatcctccaacggccttcaacaaggacaagctgaactctttcatcacccagtattctactggccaagtcagcgtggagatcgagtgggagctgcagaaggaaaacagcaagcgctggaacccggagatccagtacacttccaactattacaagtctaataatgttgaatttgctgttaatactgaaggtgtatatagtgaaccccgccccattggcacgcggtatttaacgaggaactta

SEQ ID NO: 23 - DNA, 2226 bp, synthetic construct
  source 1..2226: mol_type = other DNA
atggctgccgatggttatcttccagattggctcgaggacaaccttagtgaaggaattcgcgagtggtgggctttgaaacctggagcccctcaacccaaggcaaatcaacaacatcaagacaacgctcgaggtcttgtgcttccgggttacaaataccttggacccggcaacggactcgacaagggggagccggtcaacgcagcagacgcggcggccctcgagcacgacaaggcctacgaccagcagctcaaggccggagacaacccgtacctcaagtacaaccacgccgacgccgagttccaggagcggctcaaagaagatacgtcttttgggggcaacctcgggcgagcagtcttccaggccaaaaagaggcttcttgaacctcttggtctggttgaggaagcggctaagacggctcctggaaagaagaggcctgtagagcagtctcctcaggaaccggactcctccgcgggtattggcaaatcgggtgcacagcccgctaaaaagagactcaatttcggtcagactggcgacacagagtcagtcccagaccctcaaccaatcggagaacctcccgcagccccctcaggtgtgggatctcttacaatggcttcaggtggtggcgcaccagtggcagacaataacgaaggtgccgatggagtgggtagttcctcgggaaattggcattgcgattcccaatggctgggggacagagtcatcaccaccagcacccgaacctgggccctgcccacctacaacaatcacctctacaagcaaatctccaacagcacatctggaggatcttcaaatgacaacgcctacttcggctacagcaccccctgggggtattttgacttcaacagattccactgccacttctcaccacgtgactggcagcgactcatcaacaacaactggggattccggcctaagcgactcaacttcaagctcttcaacattcaggtcaaagaggttacggacaacaatggagtcaagaccatcgccaataaccttaccagcacggtccaggtcttcacggactcagactatcagctcccgtacgtgctcgggtcggctcacgagggctgcctcccgccgttcccagcggacgttttcatgattcctcagtacgggtatctgacgcttaatgatggaagccaggccgtgggtcgttcgtccttttactgcctggaatatttcccgtcgcaaatgctaagaacgggtaacaacttccagttcagctacgagtttgagaacgtacctttccatagcagctacgctcacagccaaagcctggaccgactaatgaatccactcatcgatcagtatctgtattacttgagtaagacgattaatggttctggttctccgcattctaaggcgcaggcgcgtaagacgttgaagttttcggtagctggtcctagcaacatggctgtccagggaagaaactacatacctggacccagctaccgacaacaacgtgtctcaaccactgtgactcaaaacaacaacagcgaatttgcttggcctggagcttcttcttgggctctcaatggacgtaatagcttgatgaatcctggacctgctatggccagccacaaagaaggagaggaccgtttctttcctttgtctggatctttaatttttggcaaacaaggaactggaagagacaacgtggatgcggacaaagtcatgataaccaacgaagaagaaattaaaactactaacccggtagcaacggagtcctatggacaagtggccacaaaccaccagagtgcccaagcacaggcgcagaccggctgggttcaaaaccaaggaatacttccgggtatggtttggcaggacagagatgtgtacctgcaaggacccatttgggccaaaattcctcacacggacggcaactttcacccttctccgctgatgggagggtttggaatgaagcacccgcctcctcagatcctcatcaaaaacacacctgtacctgcggatcctccaacggccttcaacaaggacaagctgaactctttcatcacccagtattctactggccaagtcagcgtggagatcgagtgggagctgcagaaggaaaacagcaagcgctggaacccggagatccagtacacttccaactattacaagtctaataatgttgaatttgctgttaatactgaaggtgtatatagtgaaccccgccccattggcacgcggtatttaacgaggaactta

SEQ ID NO: 24 - DNA, 2226 bp, synthetic construct
  source 1..2226: mol_type = other DNA
atggctgccgatggttatcttccagattggctcgaggacaaccttagtgaaggaattcgcgagtggtgggctttgaaacctggagcccctcaacccaaggcaaatcaacaacatcaagacaacgctcgaggtcttgtgcttccgggttacaaataccttggacccggcaacggactcgacaagggggagccggtcaacgcagcagacgcggcggccctcgagcacgacaaggcctacgaccagcagctcaaggccggagacaacccgtacctcaagtacaaccacgccgacgccgagttccaggagcggctcaaagaagatacgtcttttgggggcaacctcgggcgagcagtcttccaggccaaaaagaggcttcttgaacctcttggtctggttgaggaagcggctaagacggctcctggaaagaagaggcctgtagagcagtctcctcaggaaccggactcctccgcgggtattggcaaatcgggtgcacagcccgctaaaaagagactcaatttcggtcagactggcgacacagagtcagtcccagaccctcaaccaatcggagaacctcccgcagccccctcaggtgtgggatctcttacaatggcttcaggtggtggcgcaccagtggcagacaataacgaaggtgccgatggagtgggtagttcctcgggaaattggcattgcgattcccaatggctgggggacagagtcatcaccaccagcacccgaacctgggccctgcccacctacaacaatcacctctacaagcaaatctccaacagcacatctggaggatcttcaaatgacaacgcctacttcggctacagcaccccctgggggtattttgacttcaacagattccactgccacttctcaccacgtgactggcagcgactcatcaacaacaactggggattccggcctaagcgactcaacttcaagctcttcaacattcaggtcaaagaggttacggacaacaatggagtcaagaccatcgccaataaccttaccagcacggtccaggtcttcacggactcagactatcagctcccgtacgtgctcgggtcggctcacgagggctgcctcccgccgttcccagcggacgttttcatgattcctcagtacgggtatctgacgcttaatgatggaagccaggccgtgggtcgttcgtccttttactgcctggaatatttcccgtcgcaaatgctaagaacgggtaacaacttccagttcagctacgagtttgagaacgtacctttccatagcagctacgctcacagccaaagcctggaccgactaatgaatccactcatcgatcagtatctgtattacttgagtaagtatattgtgggttctggttctccgcattctaaggcgcagaatcagcagacgttgaagttttcggtagctggtcctagcaacatggctgtccagggaagaaactacatacctggacccagctaccgacaacaacgtgtctcaaccactgtgactcaaaacaacaacagcgaatttgcttggcctggagcttcttcttgggctctcaatggacgtaatagcttgatgaatcctggacctgctatggccagccacaaagaaggagaggaccgtttctttcctttgtctggatctttaatttttggcaaacaaggaactggaagagacaacgtggatgcggacaaagtcatgataaccaacgaagaagaaattaaaactactaacccggtagcaacggagtcctatggacaagtggccacaaaccaccagagtgcccaagcacaggcgcagaccggctgggttcaaaaccaaggaatacttccgggtatggtttggcaggacagagatgtgtacctgcaaggacccatttgggccaaaattcctcacacggacggcaactttcacccttctccgctgatgggagggtttggaatgaagcacccgcctcctcagatcctcatcaaaaacacacctgtacctgcggatcctccaacggccttcaacaaggacaagctgaactctttcatcacccagtattctactggccaagtcagcgtggagatcgagtgggagctgcagaaggaaaacagcaagcgctggaacccggagatccagtacacttccaactattacaagtctaataatgttgaatttgctgttaatactgaaggtgtatatagtgaaccccgccccattggcacgcggtatttaacgaggaactta

SEQ ID NO: 25 - DNA, 2226 bp, synthetic construct
  source 1..2226: mol_type = other DNA
atggctgccgatggttatcttccagattggctcgaggacaaccttagtgaaggaattcgcgagtggtgggctttgaaacctggagcccctcaacccaaggcaaatcaacaacatcaagacaacgctcgaggtcttgtgcttccgggttacaaataccttggacccggcaacggactcgacaagggggagccggtcaacgcagcagacgcggcggccctcgagcacgacaaggcctacgaccagcagctcaaggccggagacaacccgtacctcaagtacaaccacgccgacgccgagttccaggagcggctcaaagaagatacgtcttttgggggcaacctcgggcgagcagtcttccaggccaaaaagaggcttcttgaacctcttggtctggttgaggaagcggctaagacggctcctggaaagaagaggcctgtagagcagtctcctcaggaaccggactcctccgcgggtattggcaaatcgggtgcacagcccgctaaaaagagactcaatttcggtcagactggcgacacagagtcagtcccagaccctcaaccaatcggagaacctcccgcagccccctcaggtgtgggatctcttacaatggcttcaggtggtggcgcaccagtggcagacaataacgaaggtgccgatggagtgggtagttcctcgggaaattggcattgcgattcccaatggctgggggacagagtcatcaccaccagcacccgaacctgggccctgcccacctacaacaatcacctctacaagcaaatctccaacagcacatctggaggatcttcaaatgacaacgcctacttcggctacagcaccccctgggggtattttgacttcaacagattccactgccacttctcaccacgtgactggcagcgactcatcaacaacaactggggattccggcctaagcgactcaacttcaagctcttcaacattcaggtcaaagaggttacggacaacaatggagtcaagaccatcgccaataaccttaccagcacggtccaggtcttcacggactcagactatcagctcccgtacgtgctcgggtcggctcacgagggctgcctcccgccgttcccagcggacgttttcatgattcctcagtacgggtatctgacgcttaatgatggaagccaggccgtgggtcgttcgtccttttactgcctggaatatttcccgtcgcaaatgctaagaacgggtaacaacttccagttcagctacgagtttgagaacgtacctttccatagcagctacgctcacagccaaagcctggaccgactaatgaatccactcatcgatcagtatctgtattacttgagtaagacgatttctaagcgtggttctccgcattctaaggcgcagaatcagcagacgttgaagttttcggtagctggtcctagcaacatggctgtccagggaagaaactacatacctggacccagctaccgacaacaacgtgtctcaaccactgtgactcaaaacaacaacagcgaatttgcttggcctggagcttcttcttgggctctcaatggacgtaatagcttgatgaatcctggacctgctatggccagccacaaagaaggagaggaccgtttctttcctttgtctggatctttaatttttggcaaacaaggaactggaagagacaacgtggatgcggacaaagtcatgataaccaacgaagaagaaattaaaactactaacccggtagcaacggagtcctatggacaagtggccacaaaccaccagagtgcccaagcacaggcgcagaccggctgggttcaaaaccaaggaatacttccgggtatggtttggcaggacagagatgtgtacctgcaaggacccatttgggccaaaattcctcacacggacggcaactttcacccttctccgctgatgggagggtttggaatgaagcacccgcctcctcagatcctcatcaaaaacacacctgtacctgcggatcctccaacggccttcaacaaggacaagctgaactctttcatcacccagtattctactggccaagtcagcgtggagatcgagtgggagctgcagaaggaaaacagcaagcgctggaacccggagatccagtacacttccaactattacaagtctaataatgttgaatttgctgttaatactgaaggtgtatatagtgaaccccgccccattggcacgcggtatttaacgaggaactta

SEQ ID NO: 26 - DNA, 2226 bp, synthetic construct
  source 1..2226: mol_type = other DNA
atggctgccgatggttatcttccagattggctcgaggacaaccttagtgaaggaattcgcgagtggtgggctttgaaacctggagcccctcaacccaaggcaaatcaacaacatcaagacaacgctcgaggtcttgtgcttccgggttacaaataccttggacccggcaacggactcgacaagggggagccggtcaacgcagcagacgcggcggccctcgagcacgacaaggcctacgaccagcagctcaaggccggagacaacccgtacctcaagtacaaccacgccgacgccgagttccaggagcggctcaaagaagatacgtcttttgggggcaacctcgggcgagcagtcttccaggccaaaaagaggcttcttgaacctcttggtctggttgaggaagcggctaagacggctcctggaaagaagaggcctgtagagcagtctcctcaggaaccggactcctccgcgggtattggcaaatcgggtgcacagcccgctaaaaagagactcaatttcggtcagactggcgacacagagtcagtcccagaccctcaaccaatcggagaacctcccgcagccccctcaggtgtgggatctcttacaatggcttcaggtggtggcgcaccagtggcagacaataacgaaggtgccgatggagtgggtagttcctcgggaaattggcattgcgattcccaatggctgggggacagagtcatcaccaccagcacccgaacctgggccctgcccacctacaacaatcacctctacaagcaaatctccaacagcacatctggaggatcttcaaatgacaacgcctacttcggctacagcaccccctgggggtattttgacttcaacagattccactgccacttctcaccacgtgactggcagcgactcatcaacaacaactggggattccggcctaagcgactcaacttcaagctcttcaacattcaggtcaaagaggttacggacaacaatggagtcaagaccatcgccaataaccttaccagcacggtccaggtcttcacggactcagactatcagctcccgtacgtgctcgggtcggctcacgagggctgcctcccgccgttcccagcggacgttttcatgattcctcagtacgggtatctgacgcttaatgatggaagccaggccgtgggtcgttcgtccttttactgcctggaatatttcccgtcgcaaatgctaagaacgggtaacaacttccagttcagctacgagtttgagaacgtacctttccatagcagctacgctcacagccaaagcctggaccgactaatgaatccactcatcgatcagtatctgtattacttgagtaagggtctgggtggttctggttctccgcattctaaggcgcagaatcagcagacgttgaagttttcggtagctggtcctagcaacatggctgtccagggaagaaactacatacctggacccagctaccgacaacaacgtgtctcaaccactgtgactcaaaacaacaacagcgaatttgcttggcctggagcttcttcttgggctctcaatggacgtaatagcttgatgaatcctggacctgctatggccagccacaaagaaggagaggaccgtttctttcctttgtctggatctttaatttttggcaaacaaggaactggaagagacaacgtggatgcggacaaagtcatgataaccaacgaagaagaaattaaaactactaacccggtagcaacggagtcctatggacaagtggccacaaaccaccagagtgcccaagcacaggcgcagaccggctgggttcaaaaccaaggaatacttccgggtatggtttggcaggacagagatgtgtacctgcaaggacccatttgggccaaaattcctcacacggacggcaactttcacccttctccgctgatgggagggtttggaatgaagcacccgcctcctcagatcctcatcaaaaacacacctgtacctgcggatcctccaacggccttcaacaaggacaagctgaactctttcatcacccagtattctactggccaagtcagcgtggagatcgagtgggagctgcagaaggaaaacagcaagcgctggaacccggagatccagtacacttccaactattacaagtctaataatgttgaatttgctgttaatactgaaggtgtatatagtgaaccccgccccattggcacgcggtatttaacgaggaactta

SEQ ID NO: 27 - DNA, 2226 bp, synthetic construct
  source 1..2226: mol_type = other DNA
atggctgccgatggttatcttccagattggctcgaggacaaccttagtgaaggaattcgcgagtggtgggctttgaaacctggagcccctcaacccaaggcaaatcaacaacatcaagacaacgctcgaggtcttgtgcttccgggttacaaataccttggacccggcaacggactcgacaagggggagccggtcaacgcagcagacgcggcggccctcgagcacgacaaggcctacgaccagcagctcaaggccggagacaacccgtacctcaagtacaaccacgccgacgccgagttccaggagcggctcaaagaagatacgtcttttgggggcaacctcgggcgagcagtcttccaggccaaaaagaggcttcttgaacctcttggtctggttgaggaagcggctaagacggctcctggaaagaagaggcctgtagagcagtctcctcaggaaccggactcctccgcgggtattggcaaatcgggtgcacagcccgctaaaaagagactcaatttcggtcagactggcgacacagagtcagtcccagaccctcaaccaatcggagaacctcccgcagccccctcaggtgtgggatctcttacaatggcttcaggtggtggcgcaccagtggcagacaataacgaaggtgccgatggagtgggtagttcctcgggaaattggcattgcgattcccaatggctgggggacagagtcatcaccaccagcacccgaacctgggccctgcccacctacaacaatcacctctacaagcaaatctccaacagcacatctggaggatcttcaaatgacaacgcctacttcggctacagcaccccctgggggtattttgacttcaacagattccactgccacttctcaccacgtgactggcagcgactcatcaacaacaactggggattccggcctaagcgactcaacttcaagctcttcaacattcaggtcaaagaggttacggacaacaatggagtcaagaccatcgccaataaccttaccagcacggtccaggtcttcacggactcagactatcagctcccgtacgtgctcgggtcggctcacgagggctgcctcccgccgttcccagcggacgttttcatgattcctcagtacgggtatctgacgcttaatgatggaagccaggccgtgggtcgttcgtccttttactgcctggaatatttcccgtcgcaaatgctaagaacgggtaacaacttccagttcagctacgagtttgagaacgtacctttccatagcagctacgctcacagccaaagcctggaccgactaatgaatccactcatcgatcagtatctgtattacttgagtaagacgattaatggtcatgattctccgcattctaaggcgcagaatctgcagacgttgaagttttcggtagctggtcctagcaacatggctgtccagggaagaaactacatacctggacccagctaccgacaacaacgtgtctcaaccactgtgactcaaaacaacaacagcgaatttgcttggcctggagcttcttcttgggctctcaatggacgtaatagcttgatgaatcctggacctgctatggccagccacaaagaaggagaggaccgtttctttcctttgtctggatctttaatttttggcaaacaaggaactggaagagacaacgtggatgcggacaaagtcatgataaccaacgaagaagaaattaaaactactaacccggtagcaacggagtcctatggacaagtggccacaaaccaccagagtgcccaagcacaggcgcagaccggctgggttcaaaaccaaggaatacttccgggtatggtttggcaggacagagatgtgtacctgcaaggacccatttgggccaaaattcctcacacggacggcaactttcacccttctccgctgatgggagggtttggaatgaagcacccgcctcctcagatcctcatcaaaaacacacctgtacctgcggatcctccaacggccttcaacaaggacaagctgaactctttcatcacccagtattctactggccaagtcagcgtggagatcgagtgggagctgcagaaggaaaacagcaagcgctggaacccggagatccagtacacttccaactattacaagtctaataatgttgaatttgctgttaatactgaaggtgtatatagtgaaccccgccccattggcacgcggtatttaacgaggaactta

SEQ ID NO: 28 - DNA, 2226 bp, synthetic construct
  source 1..2226: mol_type = other DNA
atggctgccgatggttatcttccagattggctcgaggacaaccttagtgaaggaattcgcgagtggtgggctttgaaacctggagcccctcaacccaaggcaaatcaacaacatcaagacaacgctcgaggtcttgtgcttccgggttacaaataccttggacccggcaacggactcgacaagggggagccggtcaacgcagcagacgcggcggccctcgagcacgacaaggcctacgaccagcagctcaaggccggagacaacccgtacctcaagtacaaccacgccgacgccgagttccaggagcggctcaaagaagatacgtcttttgggggcaacctcgggcgagcagtcttccaggccaaaaagaggcttcttgaacctcttggtctggttgaggaagcggctaagacggctcctggaaagaagaggcctgtagagcagtctcctcaggaaccggactcctccgcgggtattggcaaatcgggtgcacagcccgctaaaaagagactcaatttcggtcagactggcgacacagagtcagtcccagaccctcaaccaatcggagaacctcccgcagccccctcaggtgtgggatctcttacaatggcttcaggtggtggcgcaccagtggcagacaataacgaaggtgccgatggagtgggtagttcctcgggaaattggcattgcgattcccaatggctgggggacagagtcatcaccaccagcacccgaacctgggccctgcccacctacaacaatcacctctacaagcaaatctccaacagcacatctggaggatcttcaaatgacaacgcctacttcggctacagcaccccctgggggtattttgacttcaacagattccactgccacttctcaccacgtgactggcagcgactcatcaacaacaactggggattccggcctaagcgactcaacttcaagctcttcaacattcaggtcaaagaggttacggacaacaatggagtcaagaccatcgccaataaccttaccagcacggtccaggtcttcacggactcagactatcagctcccgtacgtgctcgggtcggctcacgagggctgcctcccgccgttcccagcggacgttttcatgattcctcagtacgggtatctgacgcttaatgatggaagccaggccgtgggtcgttcgtccttttactgcctggaatatttcccgtcgcaaatgctaagaacgggtaacaacttccagttcagctacgagtttgagaacgtacctttccatagcagctacgctcacagccaaagcctggaccgactaatgaatccactcatcgatcagtatctgtattacttgagtaagacggtgaatggtcatgattctccgcattctaaggcgcagaatcagcagacgttgaagttttcggtagctggtcctagcaacatggctgtccagggaagaaactacatacctggacccagctaccgacaacaacgtgtctcaaccactgtgactcaaaacaacaacagcgaatttgcttggcctggagcttcttcttgggctctcaatggacgtaatagcttgatgaatcctggacctgctatggccagccacaaagaaggagaggaccgtttctttcctttgtctggatctttaatttttggcaaacaaggaactggaagagacaacgtggatgcggacaaagtcatgataaccaacgaagaagaaattaaaactactaacccggtagcaacggagtcctatggacaagtggccacaaaccaccagagtgcccaagcacaggcgcagaccggctgggttcaaaaccaaggaatacttccgggtatggtttggcaggacagagatgtgtacctgcaaggacccatttgggccaaaattcctcacacggacggcaactttcacccttctccgctgatgggagggtttggaatgaagcacccgcctcctcagatcctcatcaaaaacacacctgtacctgcggatcctccaacggccttcaacaaggacaagctgaactctttcatcacccagtattctactggccaagtcagcgtggagatcgagtgggagctgcagaaggaaaacagcaagcgctggaacccggagatccagtacacttccaactattacaagtctaataatgttgaatttgctgttaatactgaaggtgtatatagtgaaccccgccccattggcacgcggtatttaacgaggaactta

SEQ ID NO: 29 - DNA, 2226 bp, synthetic construct
  source 1..2226: mol_type = other DNA
atggctgccgatggttatcttccagattggctcgaggacaaccttagtgaaggaattcgcgagtggtgggctttgaaacctggagcccctcaacccaaggcaaatcaacaacatcaagacaacgctcgaggtcttgtgcttccgggttacaaataccttggacccggcaacggactcgacaagggggagccggtcaacgcagcagacgcggcggccctcgagcacgacaaggcctacgaccagcagctcaaggccggagacaacccgtacctcaagtacaaccacgccgacgccgagttccaggagcggctcaaagaagatacgtcttttgggggcaacctcgggcgagcagtcttccaggccaaaaagaggcttcttgaacctcttggtctggttgaggaagcggctaagacggctcctggaaagaagaggcctgtagagcagtctcctcaggaaccggactcctccgcgggtattggcaaatcgggtgcacagcccgctaaaaagagactcaatttcggtcagactggcgacacagagtcagtcccagaccctcaaccaatcggagaacctcccgcagccccctcaggtgtgggatctcttacaatggcttcaggtggtggcgcaccagtggcagacaataacgaaggtgccgatggagtgggtagttcctcgggaaattggcattgcgattcccaatggctgggggacagagtcatcaccaccagcacccgaacctgggccctgcccacctacaacaatcacctctacaagcaaatctccaacagcacatctggaggatcttcaaatgacaacgcctacttcggctacagcaccccctgggggtattttgacttcaacagattccactgccacttctcaccacgtgactggcagcgactcatcaacaacaactggggattccggcctaagcgactcaacttcaagctcttcaacattcaggtcaaagaggttacggacaacaatggagtcaagaccatcgccaataaccttaccagcacggtccaggtcttcacggactcagactatcagctcccgtacgtgctcgggtcggctcacgagggctgcctcccgccgttcccagcggacgttttcatgattcctcagtacgggtatctgacgcttaatgatggaagccaggccgtgggtcgttcgtccttttactgcctggaatatttcccgtcgcaaatgctaagaacgggtaacaacttccagttcagctacgagtttgagaacgtacctttccatagcagctacgctcacagccaaagcctggaccgactaatgaatccactcatcgatcagtatctgtattacttgagtaagacgattaatggtcatgattctccgcattctaaggcgctgaatcagcagacgttgaagttttcggtagctggtcctagcaacatggctgtccagggaagaaactacatacctggacccagctaccgacaacaacgtgtctcaaccactgtgactcaaaacaacaacagcgaatttgcttggcctggagcttcttcttgggctctcaatggacgtaatagcttgatgaatcctggacctgctatggccagccacaaagaaggagaggaccgtttctttcctttgtctggatctttaatttttggcaaacaaggaactggaagagacaacgtggatgcggacaaagtcatgataaccaacgaagaagaaattaaaactactaacccggtagcaacggagtcctatggacaagtggccacaaaccaccagagtgcccaagcacaggcgcagaccggctgggttcaaaaccaaggaatacttccgggtatggtttggcaggacagagatgtgtacctgcaaggacccatttgggccaaaattcctcacacggacggcaactttcacccttctccgctgatgggagggtttggaatgaagcacccgcctcctcagatcctcatcaaaaacacacctgtacctgcggatcctccaacggccttcaacaaggacaagctgaactctttcatcacccagtattctactggccaagtcagcgtggagatcgagtgggagctgcagaaggaaaacagcaagcgctggaacccggagatccagtacacttccaactattacaagtctaataatgttgaatttgctgttaatactgaaggtgtatatagtgaaccccgccccattggcacgcggtatttaacgaggaactta

SEQ ID NO: 30 - DNA, 2226 bp, synthetic construct
  source 1..2226: mol_type = other DNA
atggctgccgatggttatcttccagattggctcgaggacaaccttagtgaaggaattcgcgagtggtgggctttgaaacctggagcccctcaacccaaggcaaatcaacaacatcaagacaacgctcgaggtcttgtgcttccgggttacaaataccttggacccggcaacggactcgacaagggggagccggtcaacgcagcagacgcggcggccctcgagcacgacaaggcctacgaccagcagctcaaggccggagacaacccgtacctcaagtacaaccacgccgacgccgagttccaggagcggctcaaagaagatacgtcttttgggggcaacctcgggcgagcagtcttccaggccaaaaagaggcttcttgaacctcttggtctggttgaggaagcggctaagacggctcctggaaagaagaggcctgtagagcagtctcctcaggaaccggactcctccgcgggtattggcaaatcgggtgcacagcccgctaaaaagagactcaatttcggtcagactggcgacacagagtcagtcccagaccctcaaccaatcggagaacctcccgcagccccctcaggtgtgggatctcttacaatggcttcaggtggtggcgcaccagtggcagacaataacgaaggtgccgatggagtgggtagttcctcgggaaattggcattgcgattcccaatggctgggggacagagtcatcaccaccagcacccgaacctgggccctgcccacctacaacaatcacctctacaagcaaatctccaacagcacatctggaggatcttcaaatgacaacgcctacttcggctacagcaccccctgggggtattttgacttcaacagattccactgccacttctcaccacgtgactggcagcgactcatcaacaacaactggggattccggcctaagcgactcaacttcaagctcttcaacattcaggtcaaagaggttacggacaacaatggagtcaagaccatcgccaataaccttaccagcacggtccaggtcttcacggactcagactatcagctcccgtacgtgctcgggtcggctcacgagggctgcctcccgccgttcccagcggacgttttcatgattcctcagtacgggtatctgacgcttaatgatggaagccaggccgtgggtcgttcgtccttttactgcctggaatatttcccgtcgcaaatgctaagaacgggtaacaacttccagttcagctacgagtttgagaacgtacctttccatagcagctacgctcacagccaaagcctggaccgactaatgaatccactcatcgatcagtatctgtattacttgagtaagacgattaatggtcatgattctccgcattctaaggcgcagaatcagcagtctttgaagttttcggtagctggtcctagcaacatggctgtccagggaagaaactacatacctggacccagctaccgacaacaacgtgtctcaaccactgtgactcaaaacaacaacagcgaatttgcttggcctggagcttcttcttgggctctcaatggacgtaatagcttgatgaatcctggacctgctatggccagccacaaagaaggagaggaccgtttctttcctttgtctggatctttaatttttggcaaacaaggaactggaagagacaacgtggatgcggacaaagtcatgataaccaacgaagaagaaattaaaactactaacccggtagcaacggagtcctatggacaagtggccacaaaccaccagagtgcccaagcacaggcgcagaccggctgggttcaaaaccaaggaatacttccgggtatggtttggcaggacagagatgtgtacctgcaaggacccatttgggccaaaattcctcacacggacggcaactttcacccttctccgctgatgggagggtttggaatgaagcacccgcctcctcagatcctcatcaaaaacacacctgtacctgcggatcctccaacggccttcaacaaggacaagctgaactctttcatcacccagtattctactggccaagtcagcgtggagatcgagtgggagctgcagaaggaaaacagcaagcgctggaacccggagatccagtacacttccaactattacaagtctaataatgttgaatttgctgttaatactgaaggtgtatatagtgaaccccgccccattggcacgcggtatttaacgaggaactta

SEQ ID NO: 31 - DNA, 2226 bp, synthetic construct
  source 1..2226: mol_type = other DNA
atggctgccgatggttatcttccagattggctcgaggacaaccttagtgaaggaattcgcgagtggtgggctttgaaacctggagcccctcaacccaaggcaaatcaacaacatcaagacaacgctcgaggtcttgtgcttccgggttacaaataccttggacccggcaacggactcgacaagggggagccggtcaacgcagcagacgcggcggccctcgagcacgacaaggcctacgaccagcagctcaaggccggagacaacccgtacctcaagtacaaccacgccgacgccgagttccaggagcggctcaaagaagatacgtcttttgggggcaacctcgggcgagcagtcttccaggccaaaaagaggcttcttgaacctcttggtctggttgaggaagcggctaagacggctcctggaaagaagaggcctgtagagcagtctcctcaggaaccggactcctccgcgggtattggcaaatcgggtgcacagcccgctaaaaagagactcaatttcggtcagactggcgacacagagtcagtcccagaccctcaaccaatcggagaacctcccgcagccccctcaggtgtgggatctcttacaatggcttcaggtggtggcgcaccagtggcagacaataacgaaggtgccgatggagtgggtagttcctcgggaaattggcattgcgattcccaatggctgggggacagagtcatcaccaccagcacccgaacctgggccctgcccacctacaacaatcacctctacaagcaaatctccaacagcacatctggaggatcttcaaatgacaacgcctacttcggctacagcaccccctgggggtattttgacttcaacagattccactgccacttctcaccacgtgactggcagcgactcatcaacaacaactggggattccggcctaagcgactcaacttcaagctcttcaacattcaggtcaaagaggttacggacaacaatggagtcaagaccatcgccaataaccttaccagcacggtccaggtcttcacggactcagactatcagctcccgtacgtgctcgggtcggctcacgagggctgcctcccgccgttcccagcggacgttttcatgattcctcagtacgggtatctgacgcttaatgatggaagccaggccgtgggtcgttcgtccttttactgcctggaatatttcccgtcgcaaatgctaagaacgggtaacaacttccagttcagctacgagtttgagaacgtacctttccatagcagctacgctcacagccaaagcctggaccgactaatgaatccactcatcgatcagtatctgtattacttgagtaagacgattaatggtcatgattctccgcattctaaggcgcagaatcagcagattttgaagttttcggtagctggtcctagcaacatggctgtccagggaagaaactacatacctggacccagctaccgacaacaacgtgtctcaaccactgtgactcaaaacaacaacagcgaatttgcttggcctggagcttcttcttgggctctcaatggacgtaatagcttgatgaatcctggacctgctatggccagccacaaagaaggagaggaccgtttctttcctttgtctggatctttaatttttggcaaacaaggaactggaagagacaacgtggatgcggacaaagtcatgataaccaacgaagaagaaattaaaactactaacccggtagcaacggagtcctatggacaagtggccacaaaccaccagagtgcccaagcacaggcgcagaccggctgggttcaaaaccaaggaatacttccgggtatggtttggcaggacagagatgtgtacctgcaaggacccatttgggccaaaattcctcacacggacggcaactttcacccttctccgctgatgggagggtttggaatgaagcacccgcctcctcagatcctcatcaaaaacacacctgtacctgcggatcctccaacggccttcaacaaggacaagctgaactctttcatcacccagtattctactggccaagtcagcgtggagatcgagtgggagctgcagaaggaaaacagcaagcgctggaacccggagatccagtacacttccaactattacaagtctaataatgttgaatttgctgttaatactgaaggtgtatatagtgaaccccgccccattggcacgcggtatttaacgaggaactta

SEQ ID NO: 32 - DNA, 2226 bp, synthetic construct
  source 1..2226: mol_type = other DNA
atggctgccgatggttatcttccagattggctcgaggacaaccttagtgaaggaattcgcgagtggtgggctttgaaacctggagcccctcaacccaaggcaaatcaacaacatcaagacaacgctcgaggtcttgtgcttccgggttacaaataccttggacccggcaacggactcgacaagggggagccggtcaacgcagcagacgcggcggccctcgagcacgacaaggcctacgaccagcagctcaaggccggagacaacccgtacctcaagtacaaccacgccgacgccgagttccaggagcggctcaaagaagatacgtcttttgggggcaacctcgggcgagcagtcttccaggccaaaaagaggcttcttgaacctcttggtctggttgaggaagcggctaagacggctcctggaaagaagaggcctgtagagcagtctcctcaggaaccggactcctccgcgggtattggcaaatcgggtgcacagcccgctaaaaagagactcaatttcggtcagactggcgacacagagtcagtcccagaccctcaaccaatcggagaacctcccgcagccccctcaggtgtgggatctcttacaatggcttcaggtggtggcgcaccagtggcagacaataacgaaggtgccgatggagtgggtagttcctcgggaaattggcattgcgattcccaatggctgggggacagagtcatcaccaccagcacccgaacctgggccctgcccacctacaacaatcacctctacaagcaaatctccaacagcacatctggaggatcttcaaatgacaacgcctacttcggctacagcaccccctgggggtattttgacttcaacagattccactgccacttctcaccacgtgactggcagcgactcatcaacaacaactggggattccggcctaagcgactcaacttcaagctcttcaacattcaggtcaaagaggttacggacaacaatggagtcaagaccatcgccaataaccttaccagcacggtccaggtcttcacggactcagactatcagctcccgtacgtgctcgggtcggctcacgagggctgcctcccgccgttcccagcggacgttttcatgattcctcagtacgggtatctgacgcttaatgatggaagccaggccgtgggtcgttcgtccttttactgcctggaatatttcccgtcgcaaatgctaagaacgggtaacaacttccagttcagctacgagtttgagaacgtacctttccatagcagctacgctcacagccaaagcctggaccgactaatgaatccactcatcgatcagtatctgtattacttgagtaagacgattaatggttctggttctccgcattttacgcgtcagaatcagcagacgttgaagttttcggtagctggtcctagcaacatggctgtccagggaagaaactacatacctggacccagctaccgacaacaacgtgtctcaaccactgtgactcaaaacaacaacagcgaatttgcttggcctggagcttcttcttgggctctcaatggacgtaatagcttgatgaatcctggacctgctatggccagccacaaagaaggagaggaccgtttctttcctttgtctggatctttaatttttggcaaacaaggaactggaagagacaacgtggatgcggacaaagtcatgataaccaacgaagaagaaattaaaactactaacccggtagcaacggagtcctatggacaagtggccacaaaccaccagagtgcccaagcacaggcgcagaccggctgggttcaaaaccaaggaatacttccgggtatggtttggcaggacagagatgtgtacctgcaaggacccatttgggccaaaattcctcacacggacggcaactttcacccttctccgctgatgggagggtttggaatgaagcacccgcctcctcagatcctcatcaaaaacacacctgtacctgcggatcctccaacggccttcaacaaggacaagctgaactctttcatcacccagtattctactggccaagtcagcgtggagatcgagtgggagctgcagaaggaaaacagcaagcgctggaacccggagatccagtacacttccaactattacaagtctaataatgttgaatttgctgttaatactgaaggtgtatatagtgaaccccgccccattggcacgcggtatttaacgaggaactta

SEQ ID NO: 33 - DNA, 2226 bp, synthetic construct
  source 1..2226: mol_type = other DNA
atggctgccgatggttatcttccagattggctcgaggacaaccttagtgaaggaattcgcgagtggtgggctttgaaacctggagcccctcaacccaaggcaaatcaacaacatcaagacaacgctcgaggtcttgtgcttccgggttacaaataccttggacccggcaacggactcgacaagggggagccggtcaacgcagcagacgcggcggccctcgagcacgacaaggcctacgaccagcagctcaaggccggagacaacccgtacctcaagtacaaccacgccgacgccgagttccaggagcggctcaaagaagatacgtcttttgggggcaacctcgggcgagcagtcttccaggccaaaaagaggcttcttgaacctcttggtctggttgaggaagcggctaagacggctcctggaaagaagaggcctgtagagcagtctcctcaggaaccggactcctccgcgggtattggcaaatcgggtgcacagcccgctaaaaagagactcaatttcggtcagactggcgacacagagtcagtcccagaccctcaaccaatcggagaacctcccgcagccccctcaggtgtgggatctcttacaatggcttcaggtggtggcgcaccagtggcagacaataacgaaggtgccgatggagtgggtagttcctcgggaaattggcattgcgattcccaatggctgggggacagagtcatcaccaccagcacccgaacctgggccctgcccacctacaacaatcacctctacaagcaaatctccaacagcacatctggaggatcttcaaatgacaacgcctacttcggctacagcaccccctgggggtattttgacttcaacagattccactgccacttctcaccacgtgactggcagcgactcatcaacaacaactggggattccggcctaagcgactcaacttcaagctcttcaacattcaggtcaaagaggttacggacaacaatggagtcaagaccatcgccaataaccttaccagcacggtccaggtcttcacggactcagactatcagctcccgtacgtgctcgggtcggctcacgagggctgcctcccgccgttcccagcggacgttttcatgattcctcagtacgggtatctgacgcttaatgatggaagccaggccgtgggtcgttcgtccttttactgcctggaatatttcccgtcgcaaatgctaagaacgggtaacaacttccagttcagctacgagtttgagaacgtacctttccatagcagctacgctcacagccaaagcctggaccgactaatgaatccactcatcgatcagtatctgtattacttgagtaagacgtctaatggtcatgattctccgcattctaaggcgcagaatcagcagacgttgaagttttcggtagctggtcctagcaacatggctgtccagggaagaaactacatacctggacccagctaccgacaacaacgtgtctcaaccactgtgactcaaaacaacaacagcgaatttgcttggcctggagcttcttcttgggctctcaatggacgtaatagcttgatgaatcctggacctgctatggccagccacaaagaaggagaggaccgtttctttcctttgtctggatctttaatttttggcaaacaaggaactggaagagacaacgtggatgcggacaaagtcatgataaccaacgaagaagaaattaaaactactaacccggtagcaacggagtcctatggacaagtggccacaaaccaccagagtgcccaagcacaggcgcagaccggctgggttcaaaaccaaggaatacttccgggtatggtttggcaggacagagatgtgtacctgcaaggacccatttgggccaaaattcctcacacggacggcaactttcacccttctccgctgatgggagggtttggaatgaagcacccgcctcctcagatcctcatcaaaaacacacctgtacctgcggatcctccaacggccttcaacaaggacaagctgaactctttcatcacccagtattctactggccaagtcagcgtggagatcgagtgggagctgcagaaggaaaacagcaagcgctggaacccggagatccagtacacttccaactattacaagtctaataatgttgaatttgctgttaatactgaaggtgtatatagtgaaccccgccccattggcacgcggtatttaacgaggaactta

SEQ ID NO: 34 - DNA, 2226 bp, synthetic construct
  source 1..2226: mol_type = other DNA
atggctgccgatggttatcttccagattggctcgaggacaaccttagtgaaggaattcgcgagtggtgggctttgaaacctggagcccctcaacccaaggcaaatcaacaacatcaagacaacgctcgaggtcttgtgcttccgggttacaaataccttggacccggcaacggactcgacaagggggagccggtcaacgcagcagacgcggcggccctcgagcacgacaaggcctacgaccagcagctcaaggccggagacaacccgtacctcaagtacaaccacgccgacgccgagttccaggagcggctcaaagaagatacgtcttttgggggcaacctcgggcgagcagtcttccaggccaaaaagaggcttcttgaacctcttggtctggttgaggaagcggctaagacggctcctggaaagaagaggcctgtagagcagtctcctcaggaaccggactcctccgcgggtattggcaaatcgggtgcacagcccgctaaaaagagactcaatttcggtcagactggcgacacagagtcagtcccagaccctcaaccaatcggagaacctcccgcagccccctcaggtgtgggatctcttacaatggcttcaggtggtggcgcaccagtggcagacaataacgaaggtgccgatggagtgggtagttcctcgggaaattggcattgcgattcccaatggctgggggacagagtcatcaccaccagcacccgaacctgggccctgcccacctacaacaatcacctctacaagcaaatctccaacagcacatctggaggatcttcaaatgacaacgcctacttcggctacagcaccccctgggggtattttgacttcaacagattccactgccacttctcaccacgtgactggcagcgactcatcaacaacaactggggattccggcctaagcgactcaacttcaagctcttcaacattcaggtcaaagaggttacggacaacaatggagtcaagaccatcgccaataaccttaccagcacggtccaggtcttcacggactcagactatcagctcccgtacgtgctcgggtcggctcacgagggctgcctcccgccgttcccagcggacgttttcatgattcctcagtacgggtatctgacgcttaatgatggaagccaggccgtgggtcgttcgtccttttactgcctggaatatttcccgtcgcaaatgctaagaacgggtaacaacttccagttcagctacgagtttgagaacgtacctttccatagcagctacgctcacagccaaagcctggaccgactaatgaatccactcatcgatcagtatctgtattacttgagtaagacgattaatggttctggttctccgcattctctgccgtggaatcagcagacgttgaagttttcggtagctggtcctagcaacatggctgtccagggaagaaactacatacctggacccagctaccgacaacaacgtgtctcaaccactgtgactcaaaacaacaacagcgaatttgcttggcctggagcttcttcttgggctctcaatggacgtaatagcttgatgaatcctggacctgctatggccagccacaaagaaggagaggaccgtttctttcctttgtctggatctttaatttttggcaaacaaggaactggaagagacaacgtggatgcggacaaagtcatgataaccaacgaagaagaaattaaaactactaacccggtagcaacggagtcctatggacaagtggccacaaaccaccagagtgcccaagcacaggcgcagaccggctgggttcaaaaccaaggaatacttccgggtatggtttggcaggacagagatgtgtacctgcaaggacccatttgggccaaaattcctcacacggacggcaactttcacccttctccgctgatgggagggtttggaatgaagcacccgcctcctcagatcctcatcaaaaacacacctgtacctgcggatcctccaacggccttcaacaaggacaagctgaactctttcatcacccagtattctactggccaagtcagcgtggagatcgagtgggagctgcagaaggaaaacagcaagcgctggaacccggagatccagtacacttccaactattacaagtctaataatgttgaatttgctgttaatactgaaggtgtatatagtgaaccccgccccattggcacgcggtatttaacgaggaactta

SEQ ID NO: 35 - DNA, 2226 bp, synthetic construct
  source 1..2226: mol_type = other DNA
atggctgccgatggttatcttccagattggctcgaggacaaccttagtgaaggaattcgcgagtggtgggctttgaaacctggagcccctcaacccaaggcaaatcaacaacatcaagacaacgctcgaggtcttgtgcttccgggttacaaataccttggacccggcaacggactcgacaagggggagccggtcaacgcagcagacgcggcggccctcgagcacgacaaggcctacgaccagcagctcaaggccggagacaacccgtacctcaagtacaaccacgccgacgccgagttccaggagcggctcaaagaagatacgtcttttgggggcaacctcgggcgagcagtcttccaggccaaaaagaggcttcttgaacctcttggtctggttgaggaagcggctaagacggctcctggaaagaagaggcctgtagagcagtctcctcaggaaccggactcctccgcgggtattggcaaatcgggtgcacagcccgctaaaaagagactcaatttcggtcagactggcgacacagagtcagtcccagaccctcaaccaatcggagaacctcccgcagccccctcaggtgtgggatctcttacaatggcttcaggtggtggcgcaccagtggcagacaataacgaaggtgccgatggagtgggtagttcctcgggaaattggcattgcgattcccaatggctgggggacagagtcatcaccaccagcacccgaacctgggccctgcccacctacaacaatcacctctacaagcaaatctccaacagcacatctggaggatcttcaaatgacaacgcctacttcggctacagcaccccctgggggtattttgacttcaacagattccactgccacttctcaccacgtgactggcagcgactcatcaacaacaactggggattccggcctaagcgactcaacttcaagctcttcaacattcaggtcaaagaggttacggacaacaatggagtcaagaccatcgccaataaccttaccagcacggtccaggtcttcacggactcagactatcagctcccgtacgtgctcgggtcggctcacgagggctgcctcccgccgttcccagcggacgttttcatgattcctcagtacgggtatctgacgcttaatgatggaagccaggccgtgggtcgttcgtccttttactgcctggaatatttcccgtcgcaaatgctaagaacgggtaacaacttccagttcagctacgagtttgagaacgtacctttccatagcagctacgctcacagccaaagcctggaccgactaatgaatccactcatcgatcagtatctgtattacttgagtaagacgattaatggtcatgattctccgcattctaaggcgcagaatcatcagacgttgaagttttcggtagctggtcctagcaacatggctgtccagggaagaaactacatacctggacccagctaccgacaacaacgtgtctcaaccactgtgactcaaaacaacaacagcgaatttgcttggcctggagcttcttcttgggctctcaatggacgtaatagcttgatgaatcctggacctgctatggccagccacaaagaaggagaggaccgtttctttcctttgtctggatctttaatttttggcaaacaaggaactggaagagacaacgtggatgcggacaaagtcatgataaccaacgaagaagaaattaaaactactaacccggtagcaacggagtcctatggacaagtggccacaaaccaccagagtgcccaagcacaggcgcagaccggctgggttcaaaaccaaggaatacttccgggtatggtttggcaggacagagatgtgtacctgcaaggacccatttgggccaaaattcctcacacggacggcaactttcacccttctccgctgatgggagggtttggaatgaagcacccgcctcctcagatcctcatcaaaaacacacctgtacctgcggatcctccaacggccttcaacaaggacaagctgaactctttcatcacccagtattctactggccaagtcagcgtggagatcgagtgggagctgcagaaggaaaacagcaagcgctggaacccggagatccagtacacttccaactattacaagtctaataatgttgaatttgctgttaatactgaaggtgtatatagtgaaccccgccccattggcacgcggtatttaacgaggaactta

SEQ ID NO: 36 - protein, 742 aa, synthetic construct
MAADGYLPDWLEDNLSEGIREWWALKPGAPQPKANQQHQDNARGLVLPGYKYLGPGNGLDKGEPVNAADAAALEHDKAYDQQLKAGDNPYLKYNHADAEFQERLKEDTSFGGNLGRAVFQAKKRLLEPLGLVEEAAKTAPGKKRPVEQSPQEPDSSAGIGKSGAQPAKKRLNFGQTGDTESVPDPQPIGEPPAAPSGVGSLTMASGGGAPVADNNEGADGVGSSSGNWHCDSQWLGDRVITTSTRTWALPTYNNHLYKQISNSTSGGSSNDNAYFGYSTPWGYFDFNRFHCHFSPRDWQRLINNNWGFRPKRLNFKLFNIQVKEVTDNNGVKTIANNLTSTVQVFTDSDYQLPYVLGSAHEGCLPPFPADVFMIPQYGYLTLNDGSQAVGRSSFYCLEYFPSQMLRTGNNFQFSYEFENVPFHSSYAHSQSLDRLMNPLIDQYLYYLSKTERVSGSPHSKAQNQQTLKFSVAGPSNMAVQGRNYIPGPSYRQQRVSTTVTQNNNSEFAWPGASSWALNGRNSLMNPGPAMASHKEGEDRFFPLSGSLIFGKQGTGRDNVDADKVMITNEEEIKTTNPVATESYGQVATNHQSAQAQAQTGWVQNQGILPGMVWQDRDVYLQGPIWAKIPHTDGNFHPSPLMGGFGMKHPPPQILIKNTPVPADPPTAFNKDKLNSFITQYSTGQVSVEIEWELQKENSKRWNPEIQYTSNYYKSNNVEFAVNTEGVYSEPRPIGTRYLTRNL

SEQ ID NO: 37 - protein, 742 aa, synthetic construct
MAADGYLPDWLEDNLSEGIREWWALKPGAPQPKANQQHQDNARGLVLPGYKYLGPGNGLDKGEPVNAADAAALEHDKAYDQQLKAGDNPYLKYNHADAEFQERLKEDTSFGGNLGRAVFQAKKRLLEPLGLVEEAAKTAPGKKRPVEQSPQEPDSSAGIGKSGAQPAKKRLNFGQTGDTESVPDPQPIGEPPAAPSGVGSLTMASGGGAPVADNNEGADGVGSSSGNWHCDSQWLGDRVITTSTRTWALPTYNNHLYKQISNSTSGGSSNDNAYFGYSTPWGYFDFNRFHCHFSPRDWQRLINNNWGFRPKRLNFKLFNIQVKEVTDNNGVKTIANNLTSTVQVFTDSDYQLPYVLGSAHEGCLPPFPADVFMIPQYGYLTLNDGSQAVGRSSFYCLEYFPSQMLRTGNNFQFSYEFENVPFHSSYAHSQSLDRLMNPLIDQYLYYLSKAEIGHDSPHKSGQNQQTLKFSVAGPSNMAVQGRNYIPGPSYRQQRVSTTVTQNNNSEFAWPGASSWALNGRNSLMNPGPAMASHKEGEDRFFPLSGSLIFGKQGTGRDNVDADKVMITNEEEIKTTNPVATESYGQVATNHQSAQAQAQTGWVQNQGILPGMVWQDRDVYLQGPIWAKIPHTDGNFHPSPLMGGFGMKHPPPQILIKNTPVPADPPTAFNKDKLNSLITQYSTGQVSVEIEWELQKENSKRWNPEIQYTSNYYKSNNVEFAVNTEGVYSEPRPIGTRYLTRNL

SEQ ID NO: 38 - protein, 742 aa, synthetic construct
MAADGYLPDWLEDNLSEGIREWWALKPGAPQPKANQQHQDNARGLVLPGYKYLGPGNGLDKGEPVNAADAAALEHDKAYDQQLKAGDNPYLKYNHADAEFQERLKEDTSFGGNLGRAVFQAKKRLLEPLGLVEEAAKTAPGKKRPVEQSPQEPDSSAGIGKSGAQPAKKRLNFGQTGDTESVPDPQPIGEPPAAPSGVGSLTMASGGGAPVADNNEGADGVGSSSGNWHCDSQWLGDRVITTSTRTWALPTYNNHLYKQISNSTSGGSSNDNAYFGYSTPWGYFDFNRFHCHFSPRDWQRLINNNWGFRPKRLNFKLFNIQVKEVTDNNGVKTIANNLTSTVQVFTDSDYQLPYVLGSAHEGCLPPFPADVFMIPQYGYLTLNDGSQAVGRSSFYCLEYFPSQMLRTGNNFQFSYEFENVPFHSSYAHSQSLDRLMNPLIDQYLYYLSKTIIGSGSPHSKAQNRHTLKFSVAGPSNMAVQGRNYIPGPSYRQQRVSTTVTQNNNSEFAWPGASSWALNGRNSLMNPGPAMASHKEGEDRFFPLSGSLIFGKQGTGRDNVDADKVMITNEEEIKTTNPVATESYGQVATNHQSAQAQAQTGWVQNQGILPGMVWQDRDVYLQGPIWAKIPHTDGNFHPSPLMGGFGMKHPPPQILIKNTPVPADPPTAFNKDKLNSFITQYSTGQVSVEIEWELQKENSKRWNPEIQYTSNYYKSNNVEFAVNTEGVYSEPRPIGTRYLTRNL

SEQ ID NO: 39 - protein, 742 aa, synthetic construct
MAADGYLPDWLEDNLSEGIREWWALKPGAPQPKANQQHQDNARGLVLPGYKYLGPGNGLDKGEPVNAADAAALEHDKAYDQQLKAGDNPYLKYNHADAEFQERLKEDTSFGGNLGRAVFQAKKRLLEPLGLVEEAAKTAPGKKRPVEQSPQEPDSSAGIGKSGAQPAKKRLNFGQTGDTESVPDPQPIGEPPAAPSGVGSLTMASGGGAPVADNNEGADGVGSSSGNWHCDSQWLGDRVITTSTRTWALPTYNNHLYKQISNSTSGGSSNDNAYFGYSTPWGYFDFNRFHCHFSPRDWQRLINNNWGFRPKRLNFKLFNIQVKEVTDNNGVKTIANNLTSTVQVFTDSDYQLPYVLGSAHEGCLPPFPADVFMIPQYGYLTLNDGSQAVGRSSFYCLEYFPSQMLRTGNNFQFSYEFENVPFHSSYAHSQSLDRLMNPLIDQYLYYLSKTEKMSGSPHSKAQNQQTLKFSVAGPSNMAVQGRNYIPGPSYRQQRVSTTVTQNNNSEFAWPGASSWALNGRNSLMNPGPAMASHKEGEDRFFPLSGSLIFGKQGTGRDNVDADKVMITNEEEIKTTNPVATESYGQVATNHQSAQAQAQTGWVQNQGILPGMVWQDRDVYLQGPIWAKIPHTDGNFHPSPLMGGFGMKHPPPQILIKNTPVPADPPTAFNKDKLNSFITQYSTGQVSVEIEWELQKENSKRWNPEIQYTSNYYKSNNVEFAVNTEGVYSEPRPIGTRYLTRNL

SEQ ID NO: 40 - protein, 742 aa, synthetic construct
MAADGYLPDWLEDNLSEGIREWWALKPGAPQPKANQQHQDNARGLVLPGYKYLGPGNGLDKGEPVNAADAAALEHDKAYDQQLKAGDNPYLKYNHADAEFQERLKEDTSFGGNLGRAVFQAKKRLLEPLGLVEEAAKTAPGKKRPVEQSPQEPDSSAGIGKSGAQPAKKRLNFGQTGDTESVPDPQPIGEPPAAPSGVGSLTMASGGGAPVADNNEGADGVGSSSGNWHCDSQWLGDRVITTSTRTWALPTYNNHLYKQISNSTSGGSSNDNAYFGYSTPWGYFDFNRFHCHFSPRDWQRLINNNWGFRPKRLNFKLFNIQVKEVTDNNGVKTIANNLTSTVQVFTDSDYQLPYVLGSAHEGCLPPFPADVFMIPQYGYLTLNDGSQAVGRSSFYCLEYFPSQMLRTGNNFQFSYEFENVPFHSSYAHSQSLDRLMNPLIDQYLYYLSKEINGRGSPHSKAQNQQTLKFSVAGPSNMAVQGRNYIPGPSYRQQRVSTTVTQNNNSEFAWPGASSWALNGRNSLMNPGPAMASHKEGEDRFFPLSGSLIFGKQGTGRDNVDADKVMITNEEEIKTTNPVATESYGQVATNHQSAQAQAQTGWVQNQGILPGMVWQDRDVYLQGPIWAKIPHTDGNFHPSPLMGGFGMKHPPPQILIKNTPVPADPPTAFNKDKLNSFITQYSTGQVSVEIEWELQKENSKRWNPEIQYTSNYYKSNNVEFAVNTEGVYSEPRPIGTRYLTRNL

SEQ ID NO: 41 - protein, 742 aa, synthetic construct
MAADGYLPDWLEDNLSEGIREWWALKPGAPQPKANQQHQDNARGLVLPGYKYLGPGNGLDKGEPVNAADAAALEHDKAYDQQLKAGDNPYLKYNHADAEFQERLKEDTSFGGNLGRAVFQAKKRLLEPLGLVEEAAKTAPGKKRPVEQSPQEPDSSAGIGKSGAQPAKKRLNFGQTGDTESVPDPQPIGEPPAAPSGVGSLTMASGGGAPVADNNEGADGVGSSSGNWHCDSQWLGDRVITTSTRTWALPTYNNHLYKQISNSTSGGSSNDNAYFGYSTPWGYFDFNRFHCHFSPRDWQRLINNNWGFRPKRLNFKLFNIQVKEVTDNNGVKTIANNLTSTVQVFTDSDYQLPYVLGSAHEGCLPPFPADVFMIPQYGYLTLNDGSQAVGRSSFYCLEYFPSQMLRTGNNFQFSYEFENVPFHSSYAHSQSLDRLMNPLIDQYLYYLSKTFNGSGSPHSKAPNLQTLKFSVAGPSNMAVQGRNYIPGPSYRQQRVSTTVTQNNNSEFAWPGASSWALNGRNSLMNPGPAMASHKEGEDRFFPLSGSLIFGKQGTGRDNVDADKVMITNEEEIKTTNPVATESYGQVATNHQSAQAQAQTGWVQNQGILPGMVWQDRDVYLQGPIWAKIPHTDGNFHPSPLMGGFGMKHPPPQILIKNTPVPADPPTAFNKDKLNSFITQYSTGQVSVEIEWELQKENSKRWNPEIQYTSNYYKSNNVEFAVNTEGVYSEPRPIGTRYLTRNL

SEQ ID NO: 42 - protein, 742 aa, synthetic construct
MAADGYLPDWLEDNLSEGIREWWALKPGAPQPKANQQHQDNARGLVLPGYKYLGPGNGLDKGEPVNAADAAALEHDKAYDQQLKAGDNPYLKYNHADAEFQERLKEDTSFGGNLGRAVFQAKKRLLEPLGLVEEAAKTAPGKKRPVEQSPQEPDSSAGIGKSGAQPAKKRLNFGQTGDTESVPDPQPIGEPPAAPSGVGSLTMASGGGAPVADNNEGADGVGSSSGNWHCDSQWLGDRVITTSTRTWALPTYNNHLYKQISNSTSGGSSNDNAYFGYSTPWGYFDFNRFHCHFSPRDWQRLINNNWGFRPKRLNFKLFNIQVKEVTDNNGVKTIANNLTSTVQVFTDSDYQLPYVLGSAHEGCLPPFPADVFMIPQYGYLTLNDGSQAVGRSSFYCLEYFPSQMLRTGNNFQFSYEFENVPFHSSYAHSQSLDRLMNPLIDQYLYYLSKTEKTSGSPHSKAQNQQTLKFSVAGPSNMAVQGRNYIPGPSYRQQRVSTTVTQNNNSEFAWPGASSWALNGRNSLMNPGPAMASHKEGEDRFFPLSGSLIFGKQGTGRDNVDADKVMITNEEEIKTTNPVATESYGQVATNHQSAQAQAQTGWVQNQGILPGMVWQDRDVYLQGPIWAKIPHTDGNFHPSPLMGGFGMKHPPPQILIKNTPVPADPPTAFNKDKLNSFITQYSTGQVSVEIEWELQKENSKRWNPEIQYTSNYYKSNNVEFAVNTEGVYSEPRPIGTRYLTRNL

SEQ ID NO: 43 - protein, 742 aa, synthetic construct
MAADGYLPDWLEDNLSEGIREWWALKPGAPQPKANQQHQDNARGLVLPGYKYLGPGNGLDKGEPVNAADAAALEHDKAYDQQLKAGDNPYLKYNHADAEFQERLKEDTSFGGNLGRAVFQAKKRLLEPLGLVEEAAKTAPGKKRPVEQSPQEPDSSAGIGKSGAQPAKKRLNFGQTGDTESVPDPQPIGEPPAAPSGVGSLTMASGGGAPVADNNEGADGVGSSSGNWHCDSQWLGDRVITTSTRTWALPTYNNHLYKQISNSTSGGSSNDNAYFGYSTPWGYFDFNRFHCHFSPRDWQRLINNNWGFRPKRLNFKLFNIQVKEVTDNNGVKTIANNLTSTVQVFTDSDYQLPYVLGSAHEGCLPPFPADVFMIPQYGYLTLNDGSQAVGRSSFYCLEYFPSQMLRTGNNFQFSYEFENVPFHSSYAHSQSLDRLMNPLIDQYLYYLSKTMNGHDSPHSKAQNQQTLKFSVAGPSNMAVQGRNYIPGPSYRQQRVSTTVTQNNNSEFAWPGASSWALNGRNSLMNPGPAMASHKEGEDRFFPLSGSLIFGKQGTGRDNVDADKVMITNEEEIKTTNPVATESYGQVATNHQSAQAQAQTGWVQNQGILPGMVWQDRDVYLQGPIWAKIPHTDGNFHPSPLMGGFGMKHPPPQILIKNTPVPADPPTAFNKDKLNSFITQYSTGQVSVEIEWELQKENSKRWNPEIQYTSNYYKSNNVEFAVNTEGVYSEPRPIGTRYLTRNL

SEQ ID NO: 44 - protein, 742 aa, synthetic construct
MAADGYLPDWLEDNLSEGIREWWALKPGAPQPKANQQHQDNARGLVLPGYKYLGPGNGLDKGEPVNAADAAALEHDKAYDQQLKAGDNPYLKYNHADAEFQERLKEDTSFGGNLGRAVFQAKKRLLEPLGLVEEAAKTAPGKKRPVEQSPQEPDSSAGIGKSGAQPAKKRLNFGQTGDTESVPDPQPIGEPPAAPSGVGSLTMASGGGAPVADNNEGADGVGSSSGNWHCDSQWLGDRVITTSTRTWALPTYNNHLYKQISNSTSGGSSNDNAYFGYSTPWGYFDFNRFHCHFSPRDWQRLINNNWGFRPKRLNFKLFNIQVKEVTDNNGVKTIANNLTSTVQVFTDSDYQLPYVLGSAHEGCLPPFPADVFMIPQYGYLTLNDGSQAVGRSSFYCLEYFPSQMLRTGNNFQFSYEFENVPFHSSYAHSQSLDRLMNPLIDQYLYYLSKTIDGHDSPHSKAQNQQTLKFSVAGPSNMAVQGRNYIPGPSYRQQRVSTTVTQNNNSEFAWPGASSWALNGRNSLMNPGPAMASHKEGEDRFFPLSGSLIFGKQGTGRDNVDADKVMITNEEEIKTTNPVATESYGQVATNHQSAQAQAQTGWVQNQGILPGMVWQDRDVYLQGPIWAKIPHTDGNFHPSPLMGGFGMKHPPPQILIKNTPVPADPPTAFNKDKLNSFITQYSTGQVSVEIEWELQKENSKRWNPEIQYTSNYYKSNNVEFAVNTEGVYSEPRPIGTRYLTRNL

SEQ ID NO: 45 - protein, 742 aa, synthetic construct
MAADGYLPDWLEDNLSEGIREWWALKPGAPQPKANQQHQDNARGLVLPGYKYLGPGNGLDKGEPVNAADAAALEHDKAYDQQLKAGDNPYLKYNHADAEFQERLKEDTSFGGNLGRAVFQAKKRLLEPLGLVEEAAKTAPGKKRPVEQSPQEPDSSAGIGKSGAQPAKKRLNFGQTGDTESVPDPQPIGEPPAAPSGVGSLTMASGGGAPVADNNEGADGVGSSSGNWHCDSQWLGDRVITTSTRTWALPTYNNHLYKQISNSTSGGSSNDNAYFGYSTPWGYFDFNRFHCHFSPRDWQRLINNNWGFRPKRLNFKLFNIQVKEVTDNNGVKTIANNLTSTVQVFTDSDYQLPYVLGSAHEGCLPPFPADVFMIPQYGYLTLNDGSQAVGRSSFYCLEYFPSQMLRTGNNFQFSYEFENVPFHSSYAHSQSLDRLMNPLIDQYLYYLSKTNNGHDSPHSKAQNQQTLKFSVAGPSNMAVQGRNYIPGPSYRQQRVSTTVTQNNNSEFAWPGASSWALNGRNSLMNPGPAMASHKEGEDRFFPLSGSLIFGKQGTGRDNVDADKVMITNEEEIKTTNPVATESYGQVATNHQSAQAQAQTGWVQNQGILPGMVWQDRDVYLQGPIWAKIPHTDGNFHPSPLMGGFGMKHPPPQILIKNTPVPADPPTAFNKDKLNSFITQYSTGQVSVEIEWELQKENSKRWNPEIQYTSNYYKSNNVEFAVNTEGVYSEPRPIGTRYLTRNL

SEQ ID NO: 46 - protein, 742 aa, synthetic construct
MAADGYLPDWLEDNLSEGIREWWALKPGAPQPKANQQHQDNARGLVLPGYKYLGPGNGLDKGEPVNAADAAALEHDKAYDQQLKAGDNPYLKYNHADAEFQERLKEDTSFGGNLGRAVFQAKKRLLEPLGLVEEAAKTAPGKKRPVEQSPQEPDSSAGIGKSGAQPAKKRLNFGQTGDTESVPDPQPIGEPPAAPSGVGSLTMASGGGAPVADNNEGADGVGSSSGNWHCDSQWLGDRVITTSTRTWALPTYNNHLYKQISNSTSGGSSNDNAYFGYSTPWGYFDFNRFHCHFSPRDWQRLINNNWGFRPKRLNFKLFNIQVKEVTDNNGVKTIANNLTSTVQVFTDSDYQLPYVLGSAHEGCLPPFPADVFMIPQYGYLTLNDGSQAVGRSSFYCLEYFPSQMLRTGNNFQFSYEFENVPFHSSYAHSQSLDRLMNPLIDQYLYYLSKTQRKSGSPHSKAQNQQTLKFSVAGPSNMAVQGRNYIPGPSYRQQRVSTTVTQNNNSEFAWPGASSWALNGRNSLMNPGPAMASHKEGEDRFFPLSGSLIFGKQGTGRDNVDADKVMITNEEEIKTTNPVATESYGQVATNHQSAQAQAQTGWVQNQGILPGMVWQDRDVYLQGPIWAKIPHTDGNFHPSPLMGGFGMKHPPPQILIKNTPVPADPPTAFNKDKLNSFITQYSTGQVSVEIEWELQKENSKRWNPEIQYTSNYYKSNNVEFAVNTEGVYSEPRPIGTRYLTRNL

SEQ ID NO: 47 - protein, 742 aa, synthetic construct
MAADGYLPDWLEDNLSEGIREWWALKPGAPQPKANQQHQDNARGLVLPGYKYLGPGNGLDKGEPVNAADAAALEHDKAYDQQLKAGDNPYLKYNHADAEFQERLKEDTSFGGNLGRAVFQAKKRLLEPLGLVEEAAKTAPGKKRPVEQSPQEPDSSAGIGKSGAQPAKKRLNFGQTGDTESVPDPQPIGEPPAAPSGVGSLTMASGGGAPVADNNEGADGVGSSSGNWHCDSQWLGDRVITTSTRTWALPTYNNHLYKQISNSTSGGSSNDNAYFGYSTPWGYFDFNRFHCHFSPRDWQRLINNNWGFRPKRLNFKLFNIQVKEVTDNNGVKTIANNLTSTVQVFTDSDYQLPYVLGSAHEGCLPPFPADVFMIPQYGYLTLNDGSQAVGRSSFYCLEYFPSQMLRTGNNFQFSYEFENVPFHSSYAHSQSLDRLMNPLIDQYLYYLSKTINGSGSPHSKAQARKTLKFSVAGPSNMAVQGRNYIPGPSYRQQRVSTTVTQNNNSEFAWPGASSWALNGRNSLMNPGPAMASHKEGEDRFFPLSGSLIFGKQGTGRDNVDADKVMITNEEEIKTTNPVATESYGQVATNHQSAQAQAQTGWVQNQGILPGMVWQDRDVYLQGPIWAKIPHTDGNFHPSPLMGGFGMKHPPPQILIKNTPVPADPPTAFNKDKLNSFITQYSTGQVSVEIEWELQKENSKRWNPEIQYTSNYYKSNNVEFAVNTEGVYSEPRPIGTRYLTRNL

SEQ ID NO: 48 - protein, 742 aa, synthetic construct
MAADGYLPDWLEDNLSEGIREWWALKPGAPQPKANQQHQDNARGLVLPGYKYLGPGNGLDKGEPVNAADAAALEHDKAYDQQLKAGDNPYLKYNHADAEFQERLKEDTSFGGNLGRAVFQAKKRLLEPLGLVEEAAKTAPGKKRPVEQSPQEPDSSAGIGKSGAQPAKKRLNFGQTGDTESVPDPQPIGEPPAAPSGVGSLTMASGGGAPVADNNEGADGVGSSSGNWHCDSQWLGDRVITTSTRTWALPTYNNHLYKQISNSTSGGSSNDNAYFGYSTPWGYFDFNRFHCHFSPRDWQRLINNNWGFRPKRLNFKLFNIQVKEVTDNNGVKTIANNLTSTVQVFTDSDYQLPYVLGSAHEGCLPPFPADVFMIPQYGYLTLNDGSQAVGRSSFYCLEYFPSQMLRTGNNFQFSYEFENVPFHSSYAHSQSLDRLMNPLIDQYLYYLSKYIVGSGSPHSKAQNQQTLKFSVAGPSNMAVQGRNYIPGPSYRQQRVSTTVTQNNNSEFAWPGASSWALNGRNSLMNPGPAMASHKEGEDRFFPLSGSLIFGKQGTGRDNVDADKVMITNEEEIKTTNPVATESYGQVATNHQSAQAQAQTGWVQNQGILPGMVWQDRDVYLQGPIWAKIPHTDGNFHPSPLMGGFGMKHPPPQILIKNTPVPADPPTAFNKDKLNSFITQYSTGQVSVEIEWELQKENSKRWNPEIQYTSNYYKSNNVEFAVNTEGVYSEPRPIGTRYLTRNL

SEQ ID NO: 49 - protein, 742 aa, synthetic construct
MAADGYLPDWLEDNLSEGIREWWALKPGAPQPKANQQHQDNARGLVLPGYKYLGPGNGLDKGEPVNAADAAALEHDKAYDQQLKAGDNPYLKYNHADAEFQERLKEDTSFGGNLGRAVFQAKKRLLEPLGLVEEAAKTAPGKKRPVEQSPQEPDSSAGIGKSGAQPAKKRLNFGQTGDTESVPDPQPIGEPPAAPSGVGSLTMASGGGAPVADNNEGADGVGSSSGNWHCDSQWLGDRVITTSTRTWALPTYNNHLYKQISNSTSGGSSNDNAYFGYSTPWGYFDFNRFHCHFSPRDWQRLINNNWGFRPKRLNFKLFNIQVKEVTDNNGVKTIANNLTSTVQVFTDSDYQLPYVLGSAHEGCLPPFPADVFMIPQYGYLTLNDGSQAVGRSSFYCLEYFPSQMLRTGNNFQFSYEFENVPFHSSYAHSQSLDRLMNPLIDQYLYYLSKTISKRGSPHSKAQNQQTLKFSVAGPSNMAVQGRNYIPGPSYRQQRVSTTVTQNNNSEFAWPGASSWALNGRNSLMNPGPAMASHKEGEDRFFPLSGSLIFGKQGTGRDNVDADKVMITNEEEIKTTNPVATESYGQVATNHQSAQAQAQTGWVQNQGILPGMVWQDRDVYLQGPIWAKIPHTDGNFHPSPLMGGFGMKHPPPQILIKNTPVPADPPTAFNKDKLNSFITQYSTGQVSVEIEWELQKENSKRWNPEIQYTSNYYKSNNVEFAVNTEGVYSEPRPIGTRYLTRNL

SEQ ID NO: 50 - protein, 742 aa, synthetic construct
MAADGYLPDWLEDNLSEGIREWWALKPGAPQPKANQQHQDNARGLVLPGYKYLGPGNGLDKGEPVNAADAAALEHDKAYDQQLKAGDNPYLKYNHADAEFQERLKEDTSFGGNLGRAVFQAKKRLLEPLGLVEEAAKTAPGKKRPVEQSPQEPDSSAGIGKSGAQPAKKRLNFGQTGDTESVPDPQPIGEPPAAPSGVGSLTMASGGGAPVADNNEGADGVGSSSGNWHCDSQWLGDRVITTSTRTWALPTYNNHLYKQISNSTSGGSSNDNAYFGYSTPWGYFDFNRFHCHFSPRDWQRLINNNWGFRPKRLNFKLFNIQVKEVTDNNGVKTIANNLTSTVQVFTDSDYQLPYVLGSAHEGCLPPFPADVFMIPQYGYLTLNDGSQAVGRSSFYCLEYFPSQMLRTGNNFQFSYEFENVPFHSSYAHSQSLDRLMNPLIDQYLYYLSKGLGGSGSPHSKAQNQQTLKFSVAGPSNMAVQGRNYIPGPSYRQQRVSTTVTQNNNSEFAWPGASSWALNGRNSLMNPGPAMASHKEGEDRFFPLSGSLIFGKQGTGRDNVDADKVMITNEEEIKTTNPVATESYGQVATNHQSAQAQAQTGWVQNQGILPGMVWQDRDVYLQGPIWAKIPHTDGNFHPSPLMGGFGMKHPPPQILIKNTPVPADPPTAFNKDKLNSFITQYSTGQVSVEIEWELQKENSKRWNPEIQYTSNYYKSNNVEFAVNTEGVYSEPRPIGTRYLTRNL

SEQ ID NO: 51 - protein, 742 aa, synthetic construct
MAADGYLPDWLEDNLSEGIREWWALKPGAPQPKANQQHQDNARGLVLPGYKYLGPGNGLDKGEPVNAADAAALEHDKAYDQQLKAGDNPYLKYNHADAEFQERLKEDTSFGGNLGRAVFQAKKRLLEPLGLVEEAAKTAPGKKRPVEQSPQEPDSSAGIGKSGAQPAKKRLNFGQTGDTESVPDPQPIGEPPAAPSGVGSLTMASGGGAPVADNNEGADGVGSSSGNWHCDSQWLGDRVITTSTRTWALPTYNNHLYKQISNSTSGGSSNDNAYFGYSTPWGYFDFNRFHCHFSPRDWQRLINNNWGFRPKRLNFKLFNIQVKEVTDNNGVKTIANNLTSTVQVFTDSDYQLPYVLGSAHEGCLPPFPADVFMIPQYGYLTLNDGSQAVGRSSFYCLEYFPSQMLRTGNNFQFSYEFENVPFHSSYAHSQSLDRLMNPLIDQYLYYLSKTINGHDSPHSKAQNLQTLKFSVAGPSNMAVQGRNYIPGPSYRQQRVSTTVTQNNNSEFAWPGASSWALNGRNSLMNPGPAMASHKEGEDRFFPLSGSLIFGKQGTGRDNVDADKVMITNEEEIKTTNPVATESYGQVATNHQSAQAQAQTGWVQNQGILPGMVWQDRDVYLQGPIWAKIPHTDGNFHPSPLMGGFGMKHPPPQILIKNTPVPADPPTAFNKDKLNSFITQYSTGQVSVEIEWELQKENSKRWNPEIQYTSNYYKSNNVEFAVNTEGVYSEPRPIGTRYLTRNL

SEQ ID NO: 52 - protein, 742 aa, synthetic construct
MAADGYLPDWLEDNLSEGIREWWALKPGAPQPKANQQHQDNARGLVLPGYKYLGPGNGLDKGEPVNAADAAALEHDKAYDQQLKAGDNPYLKYNHADAEFQERLKEDTSFGGNLGRAVFQAKKRLLEPLGLVEEAAKTAPGKKRPVEQSPQEPDSSAGIGKSGAQPAKKRLNFGQTGDTESVPDPQPIGEPPAAPSGVGSLTMASGGGAPVADNNEGADGVGSSSGNWHCDSQWLGDRVITTSTRTWALPTYNNHLYKQISNSTSGGSSNDNAYFGYSTPWGYFDFNRFHCHFSPRDWQRLINNNWGFRPKRLNFKLFNIQVKEVTDNNGVKTIANNLTSTVQVFTDSDYQLPYVLGSAHEGCLPPFPADVFMIPQYGYLTLNDGSQAVGRSSFYCLEYFPSQMLRTGNNFQFSYEFENVPFHSSYAHSQSLDRLMNPLIDQYLYYLSKTVNGHDSPHSKAQNQQTLKFSVAGPSNMAVQGRNYIPGPSYRQQRVSTTVTQNNNSEFAWPGASSWALNGRNSLMNPGPAMASHKEGEDRFFPLSGSLIFGKQGTGRDNVDADKVMITNEEEIKTTNPVATESYGQVATNHQSAQAQAQTGWVQNQGILPGMVWQDRDVYLQGPIWAKIPHTDGNFHPSPLMGGFGMKHPPPQILIKNTPVPADPPTAFNKDKLNSFITQYSTGQVSVEIEWELQKENSKRWNPEIQYTSNYYKSNNVEFAVNTEGVYSEPRPIGTRYLTRNL

SEQ ID NO: 53 - protein, 742 aa, synthetic construct
MAADGYLPDWLEDNLSEGIREWWALKPGAPQPKANQQHQDNARGLVLPGYKYLGPGNGLDKGEPVNAADAAALEHDKAYDQQLKAGDNPYLKYNHADAEFQERLKEDTSFGGNLGRAVFQAKKRLLEPLGLVEEAAKTAPGKKRPVEQSPQEPDSSAGIGKSGAQPAKKRLNFGQTGDTESVPDPQPIGEPPAAPSGVGSLTMASGGGAPVADNNEGADGVGSSSGNWHCDSQWLGDRVITTSTRTWALPTYNNHLYKQISNSTSGGSSNDNAYFGYSTPWGYFDFNRFHCHFSPRDWQRLINNNWGFRPKRLNFKLFNIQVKEVTDNNGVKTIANNLTSTVQVFTDSDYQLPYVLGSAHEGCLPPFPADVFMIPQYGYLTLNDGSQAVGRSSFYCLEYFPSQMLRTGNNFQFSYEFENVPFHSSYAHSQSLDRLMNPLIDQYLYYLSKTINGHDSPHSKALNQQTLKFSVAGPSNMAVQGRNYIPGPSYRQQRVSTTVTQNNNSEFAWPGASSWALNGRNSLMNPGPAMASHKEGEDRFFPLSGSLIFGKQGTGRDNVDADKVMITNEEEIKTTNPVATESYGQVATNHQSAQAQAQTGWVQNQGILPGMVWQDRDVYLQGPIWAKIPHTDGNFHPSPLMGGFGMKHPPPQILIKNTPVPADPPTAFNKDKLNSFITQYSTGQVSVEIEWELQKENSKRWNPEIQYTSNYYKSNNVEFAVNTEGVYSEPRPIGTRYLTRNL

SEQ ID NO: 54 - protein, 742 aa, synthetic construct
MAADGYLPDWLEDNLSEGIREWWALKPGAPQPKANQQHQDNARGLVLPGYKYLGPGNGLDKGEPVNAADAAALEHDKAYDQQLKAGDNPYLKYNHADAEFQERLKEDTSFGGNLGRAVFQAKKRLLEPLGLVEEAAKTAPGKKRPVEQSPQEPDSSAGIGKSGAQPAKKRLNFGQTGDTESVPDPQPIGEPPAAPSGVGSLTMASGGGAPVADNNEGADGVGSSSGNWHCDSQWLGDRVITTSTRTWALPTYNNHLYKQISNSTSGGSSNDNAYFGYSTPWGYFDFNRFHCHFSPRDWQRLINNNWGFRPKRLNFKLFNIQVKEVTDNNGVKTIANNLTSTVQVFTDSDYQLPYVLGSAHEGCLPPFPADVFMIPQYGYLTLNDGSQAVGRSSFYCLEYFPSQMLRTGNNFQFSYEFENVPFHSSYAHSQSLDRLMNPLIDQYLYYLSKTINGHDSPHSKAQNQQSLKFSVAGPSNMAVQGRNYIPGPSYRQQRVSTTVTQNNNSEFAWPGASSWALNGRNSLMNPGPAMASHKEGEDRFFPLSGSLIFGKQGTGRDNVDADKVMITNEEEIKTTNPVATESYGQVATNHQSAQAQAQTGWVQNQGILPGMVWQDRDVYLQGPIWAKIPHTDGNFHPSPLMGGFGMKHPPPQILIKNTPVPADPPTAFNKDKLNSFITQYSTGQVSVEIEWELQKENSKRWNPEIQYTSNYYKSNNVEFAVNTEGVYSEPRPIGTRYLTRNL

SEQ ID NO: 55 - protein, 742 aa, synthetic construct
MAADGYLPDWLEDNLSEGIREWWALKPGAPQPKANQQHQDNARGLVLPGYKYLGPGNGLDKGEPVNAADAAALEHDKAYDQQLKAGDNPYLKYNHADAEFQERLKEDTSFGGNLGRAVFQAKKRLLEPLGLVEEAAKTAPGKKRPVEQSPQEPDSSAGIGKSGAQPAKKRLNFGQTGDTESVPDPQPIGEPPAAPSGVGSLTMASGGGAPVADNNEGADGVGSSSGNWHCDSQWLGDRVITTSTRTWALPTYNNHLYKQISNSTSGGSSNDNAYFGYSTPWGYFDFNRFHCHFSPRDWQRLINNNWGFRPKRLNFKLFNIQVKEVTDNNGVKTIANNLTSTVQVFTDSDYQLPYVLGSAHEGCLPPFPADVFMIPQYGYLTLNDGSQAVGRSSFYCLEYFPSQMLRTGNNFQFSYEFENVPFHSSYAHSQSLDRLMNPLIDQYLYYLSKTINGHDSPHSKAQNQQILKFSVAGPSNMAVQGRNYIPGPSYRQQRVSTTVTQNNNSEFAWPGASSWALNGRNSLMNPGPAMASHKEGEDRFFPLSGSLIFGKQGTGRDNVDADKVMITNEEEIKTTNPVATESYGQVATNHQSAQAQAQTGWVQNQGILPGMVWQDRDVYLQGPIWAKIPHTDGNFHPSPLMGGFGMKHPPPQILIKNTPVPADPPTAFNKDKLNSFITQYSTGQVSVEIEWELQKENSKRWNPEIQYTSNYYKSNNVEFAVNTEGVYSEPRPIGTRYLTRNL

SEQ ID NO: 56 - protein, 742 aa, synthetic construct
MAADGYLPDWLEDNLSEGIREWWALKPGAPQPKANQQHQDNARGLVLPGYKYLGPGNGLDKGEPVNAADAAALEHDKAYDQQLKAGDNPYLKYNHADAEFQERLKEDTSFGGNLGRAVFQAKKRLLEPLGLVEEAAKTAPGKKRPVEQSPQEPDSSAGIGKSGAQPAKKRLNFGQTGDTESVPDPQPIGEPPAAPSGVGSLTMASGGGAPVADNNEGADGVGSSSGNWHCDSQWLGDRVITTSTRTWALPTYNNHLYKQISNSTSGGSSNDNAYFGYSTPWGYFDFNRFHCHFSPRDWQRLINNNWGFRPKRLNFKLFNIQVKEVTDNNGVKTIANNLTSTVQVFTDSDYQLPYVLGSAHEGCLPPFPADVFMIPQYGYLTLNDGSQAVGRSSFYCLEYFPSQMLRTGNNFQFSYEFENVPFHSSYAHSQSLDRLMNPLIDQYLYYLSKTINGSGSPHFTRQNQQTLKFSVAGPSNMAVQGRNYIPGPSYRQQRVSTTVTQNNNSEFAWPGASSWALNGRNSLMNPGPAMASHKEGEDRFFPLSGSLIFGKQGTGRDNVDADKVMITNEEEIKTTNPVATESYGQVATNHQSAQAQAQTGWVQNQGILPGMVWQDRDVYLQGPIWAKIPHTDGNFHPSPLMGGFGMKHPPPQILIKNTPVPADPPTAFNKDKLNSFITQYSTGQVSVEIEWELQKENSKRWNPEIQYTSNYYKSNNVEFAVNTEGVYSEPRPIGTRYLTRNL

SEQ ID NO: 57 - protein, 742 aa, synthetic construct
MAADGYLPDWLEDNLSEGIREWWALKPGAPQPKANQQHQDNARGLVLPGYKYLGPGNGLDKGEPVNAADAAALEHDKAYDQQLKAGDNPYLKYNHADAEFQERLKEDTSFGGNLGRAVFQAKKRLLEPLGLVEEAAKTAPGKKRPVEQSPQEPDSSAGIGKSGAQPAKKRLNFGQTGDTESVPDPQPIGEPPAAPSGVGSLTMASGGGAPVADNNEGADGVGSSSGNWHCDSQWLGDRVITTSTRTWALPTYNNHLYKQISNSTSGGSSNDNAYFGYSTPWGYFDFNRFHCHFSPRDWQRLINNNWGFRPKRLNFKLFNIQVKEVTDNNGVKTIANNLTSTVQVFTDSDYQLPYVLGSAHEGCLPPFPADVFMIPQYGYLTLNDGSQAVGRSSFYCLEYFPSQMLRTGNNFQFSYEFENVPFHSSYAHSQSLDRLMNPLIDQYLYYLSKTSNGHDSPHSKAQNQQTLKFSVAGPSNMAVQGRNYIPGPSYRQQRVSTTVTQNNNSEFAWPGASSWALNGRNSLMNPGPAMASHKEGEDRFFPLSGSLIFGKQGTGRDNVDADKVMITNEEEIKTTNPVATESYGQVATNHQSAQAQAQTGWVQNQGILPGMVWQDRDVYLQGPIWAKIPHTDGNFHPSPLMGGFGMKHPPPQILIKNTPVPADPPTAFNKDKLNSFITQYSTGQVSVEIEWELQKENSKRWNPEIQYTSNYYKSNNVEFAVNTEGVYSEPRPIGTRYLTRNL

SEQ ID NO: 58 - protein, 742 aa, synthetic construct
MAADGYLPDWLEDNLSEGIREWWALKPGAPQPKANQQHQDNARGLVLPGYKYLGPGNGLDKGEPVNAADAAALEHDKAYDQQLKAGDNPYLKYNHADAEFQERLKEDTSFGGNLGRAVFQAKKRLLEPLGLVEEAAKTAPGKKRPVEQSPQEPDSSAGIGKSGAQPAKKRLNFGQTGDTESVPDPQPIGEPPAAPSGVGSLTMASGGGAPVADNNEGADGVGSSSGNWHCDSQWLGDRVITTSTRTWALPTYNNHLYKQISNSTSGGSSNDNAYFGYSTPWGYFDFNRFHCHFSPRDWQRLINNNWGFRPKRLNFKLFNIQVKEVTDNNGVKTIANNLTSTVQVFTDSDYQLPYVLGSAHEGCLPPFPADVFMIPQYGYLTLNDGSQAVGRSSFYCLEYFPSQMLRTGNNFQFSYEFENVPFHSSYAHSQSLDRLMNPLIDQYLYYLSKTINGSGSPHSLPWNQQTLKFSVAGPSNMAVQGRNYIPGPSYRQQRVSTTVTQNNNSEFAWPGASSWALNGRNSLMNPGPAMASHKEGEDRFFPLSGSLIFGKQGTGRDNVDADKVMITNEEEIKTTNPVATESYGQVATNHQSAQAQAQTGWVQNQGILPGMVWQDRDVYLQGPIWAKIPHTDGNFHPSPLMGGFGMKHPPPQILIKNTPVPADPPTAFNKDKLNSFITQYSTGQVSVEIEWELQKENSKRWNPEIQYTSNYYKSNNVEFAVNTEGVYSEPRPIGTRYLTRNL

SEQ ID NO: 59 - protein, 742 aa, synthetic construct
MAADGYLPDWLEDNLSEGIREWWALKPGAPQPKANQQHQDNARGLVLPGYKYLGPGNGLDKGEPVNAADAAALEHDKAYDQQLKAGDNPYLKYNHADAEFQERLKEDTSFGGNLGRAVFQAKKRLLEPLGLVEEAAKTAPGKKRPVEQSPQEPDSSAGIGKSGAQPAKKRLNFGQTGDTESVPDPQPIGEPPAAPSGVGSLTMASGGGAPVADNNEGADGVGSSSGNWHCDSQWLGDRVITTSTRTWALPTYNNHLYKQISNSTSGGSSNDNAYFGYSTPWGYFDFNRFHCHFSPRDWQRLINNNWGFRPKRLNFKLFNIQVKEVTDNNGVKTIANNLTSTVQVFTDSDYQLPYVLGSAHEGCLPPFPADVFMIPQYGYLTLNDGSQAVGRSSFYCLEYFPSQMLRTGNNFQFSYEFENVPFHSSYAHSQSLDRLMNPLIDQYLYYLSKTINGHDSPHSKAQNHQTLKFSVAGPSNMAVQGRNYIPGPSYRQQRVSTTVTQNNNSEFAWPGASSWALNGRNSLMNPGPAMASHKEGEDRFFPLSGSLIFGKQGTGRDNVDADKVMITNEEEIKTTNPVATESYGQVATNHQSAQAQAQTGWVQNQGILPGMVWQDRDVYLQGPIWAKIPHTDGNFHPSPLMGGFGMKHPPPQILIKNTPVPADPPTAFNKDKLNSFITQYSTGQVSVEIEWELQKENSKRWNPEIQYTSNYYKSNNVEFAVNTEGVYSEPRPIGTRYLTRNL

SEQ ID NO: 60-136 - skipped (77 entries)

SEQ ID NO: 137 - DNA, 2211 bp, synthetic construct
  source 1..2211: mol_type = other DNA
atggctgccgatggttatcttccagattggctcgaggacaaccttagtgaaggaattcgcgagtggtgggctttgaaacctggagcccctcaacccaaggcaaatcaacaacatcaagacaacgctcgaggtcttgtgcttccgggttacaaataccttggacccggcaacggactcgacaagggggagccggtcaacgcagcagacgcggcggccctcgagcacgacaaggcctacgaccagcagctcaaggccggagacaacccgtacctcaagtacaaccacgccgacgccgagttccaggagcggctcaaagaagatacgtcttttgggggcaacctcgggcgagcagtcttccaggccaaaaagaggcttcttgaacctcttggtctggttgaggaagcggctaagacggctcctggaaagaagaggcctgtagagcagtctcctcaggaaccggactcctccgcgggtattggcaaatcgggtgcacagcccgctaaaaagagactcaatttcggtcagactggcgacacagagtcagtcccagaccctcaaccaatcggagaacctcccgcagccccctcaggtgtgggatctcttacaatggcttcaggtggtggcgcaccagtggcagacaataacgaaggtgccgatggagtgggtagttcctcgggaaattggcattgcgattcccaatggctgggggacagagtcatcaccaccagcacccgaacctgggccctgcccacctacaacaatcacctctacaagcaaatctccaacagcacatctggaggatcttcaaatgacaacgcctacttcggctacagcaccccctgggggtattttgacttcaacagattccactgccacttctcaccacgtgactggcagcgactcatcaacaacaactggggattccggcctaagcgactcaacttcaagctcttcaacattcaggtcaaagaggttacggacaacaatggagtcaagaccatcgccaataaccttaccagcacggtccaggtcttcacggactcagactatcagctcccgtacgtgctcgggtcggctcacgagggctgcctcccgccgttcccagcggacgttttcatgattcctcagtacgggtatctgacgcttaatgatggaagccaggccgtgggtcgttcgtccttttactgcctggaatatttcccgtcgcaaatgctaagaacgggtaacaacttccagttcagctacgagtttgagaacgtacctttccatagcagctacgctcacagccaaagcctggaccgactaatgaatccactcatcgaccaatacttgtactatctctcaaagactattaacggttctggacagaatcaacaaacgctaaaattcagtgtggccggacccagcaacatggctgtccagggaagaaactacatacctggacccagctaccgacaacaacgtgtctcaaccactgtgactcaaaacaacaacagcgaatttgcttggcctggagcttcttcttgggctctcaatggacgtaatagcttgatgaatcctggacctgctatggccagccacaaagaaggagaggaccgtttctttcctttgtctggatctttaatttttggcaaacaaggaactggaagagacaacgtggatgcggacaaagtcatgataaccaacgaagaagaaattaaaactactaacccggtagcaacggagtcctatggacaagtggccacaaaccaccagagtgcccaagcacaggcgcagaccggctgggttcaaaaccaaggaatacttccgggtatggtttggcaggacagagatgtgtacctgcaaggacccatttgggccaaaattcctcacacggacggcaactttcacccttctccgctgatgggagggtttggaatgaagcacccgcctcctcagatcctcatcaaaaacacacctgtacctgcggatcctccaacggccttcaacaaggacaagctgaactctttcatcacccagtattctactggccaagtcagcgtggagatcgagtgggagctgcagaaggaaaacagcaagcgctggaacccggagatccagtacacttccaactattacaagtctaataatgttgaatttgctgttaatactgaaggtgtatatagtgaaccccgccccattggcaccagatacctgactcgtaatctgtaa

SEQ ID NO: 138 - protein, 736 aa, synthetic construct
MAADGYLPDWLEDNLSEGIREWWALKPGAPQPKANQQHQDNARGLVLPGYKYLGPGNGLDKGEPVNAADAAALEHDKAYDQQLKAGDNPYLKYNHADAEFQERLKEDTSFGGNLGRAVFQAKKRLLEPLGLVEEAAKTAPGKKRPVEQSPQEPDSSAGIGKSGAQPAKKRLNFGQTGDTESVPDPQPIGEPPAAPSGVGSLTMASGGGAPVADNNEGADGVGSSSGNWHCDSQWLGDRVITTSTRTWALPTYNNHLYKQISNSTSGGSSNDNAYFGYSTPWGYFDFNRFHCHFSPRDWQRLINNNWGFRPKRLNFKLFNIQVKEVTDNNGVKTIANNLTSTVQVFTDSDYQLPYVLGSAHEGCLPPFPADVFMIPQYGYLTLNDGSQAVGRSSFYCLEYFPSQMLRTGNNFQFSYEFENVPFHSSYAHSQSLDRLMNPLIDQYLYYLSKTINGSGQNQQTLKFSVAGPSNMAVQGRNYIPGPSYRQQRVSTTVTQNNNSEFAWPGASSWALNGRNSLMNPGPAMASHKEGEDRFFPLSGSLIFGKQGTGRDNVDADKVMITNEEEIKTTNPVATESYGQVATNHQSAQAQAQTGWVQNQGILPGMVWQDRDVYLQGPIWAKIPHTDGNFHPSPLMGGFGMKHPPPQILIKNTPVPADPPTAFNKDKLNSFITQYSTGQVSVEIEWELQKENSKRWNPEIQYTSNYYKSNNVEFAVNTEGVYSEPRPIGTRYLTRNL

SEQ ID NO: 139-199 - skipped (61 entries)

SEQ ID NO: 200 - protein, 14 aa, synthetic construct
GSGSPHSKAQNQQT

SEQ ID NO: 201 - protein, 14 aa, synthetic construct
GHDSPHKSGQNQQT

SEQ ID NO: 202 - protein, 14 aa, synthetic construct
GSGSPHARMQNQQT

SEQ ID NO: 203 - protein, 14 aa, synthetic construct
GSGSPHVKSQNQQT

SEQ ID NO: 204 - protein, 14 aa, synthetic construct
GQDSPHKSGQNQQT

SEQ ID NO: 205 - protein, 14 aa, synthetic construct
GSGSPHASRQNQQT

SEQ ID NO: 206 - protein, 14 aa, synthetic construct
GSGSPHASRQNKQT

SEQ ID NO: 207 - protein, 14 aa, synthetic construct
GSGSPHVKIQNQQT

SEQ ID NO: 208 - protein, 14 aa, synthetic construct
GSGSPHSKAKNQQT

SEQ ID NO: 209 - protein, 14 aa, synthetic construct
GSGSPHKKNQNQQT

SEQ ID NO: 210 - protein, 14 aa, synthetic construct
GSGSPHVRMQNQQT

SEQ ID NO: 211 - protein, 14 aa, synthetic construct
GSGSPHASRQKQQT

SEQ ID NO: 212 - protein, 14 aa, synthetic construct
GHSSPHRSGQNQQT

SEQ ID NO: 213 - protein, 14 aa, synthetic construct
GMRTYHLSGQNQQT

SEQ ID NO: 214 - protein, 14 aa, synthetic construct
GSGSPHTRGQNQQT

SEQ ID NO: 215 - protein, 14 aa, synthetic construct
GSGIIPVSSQNQQT

SEQ ID NO: 216 - protein, 14 aa, synthetic construct
GSEYGHKSGQNQQT

SEQ ID NO: 217 - protein, 14 aa, synthetic construct
GRGQNVSSVHRQQT

SEQ ID NO: 218 - protein, 14 aa, synthetic construct
GSSHRFYGGQNQQT

SEQ ID NO: 219 - protein, 14 aa, synthetic construct
GYFVAAWSGQNQQT

SEQ ID NO: 220 - protein, 14 aa, synthetic construct
GSVLHSHAAQNQQT

SEQ ID NO: 221 - protein, 14 aa, synthetic construct
GSGDLVVSTQNQQT

SEQ ID NO: 222 - protein, 14 aa, synthetic construct
GSYGMAASGQNQQT

SEQ ID NO: 223 - protein, 14 aa, synthetic construct
GLNHFGASGQNQQT

SEQ ID NO: 224 - protein, 14 aa, synthetic construct
GSTGSHSAGQNQHT

SEQ ID NO: 225 - protein, 14 aa, synthetic construct
GLAGHTVSGQNQQT

SEQ ID NO: 226 - protein, 14 aa, synthetic construct
GIILGASSGQNQQT

SEQ ID NO: 227 - protein, 14 aa, synthetic construct
GSGVSTYNIQNQQT

SEQ ID NO: 228 - protein, 14 aa, synthetic construct
GSLVSVQTGQNQQT

SEQ ID NO: 229 - protein, 14 aa, synthetic construct
GQSSPHRSGQNQQT

SEQ ID NO: 230 - protein, 14 aa, synthetic construct
GREYGHKSGQNQQT

SEQ ID NO: 231 - protein, 14 aa, synthetic construct
GHTLTLSSGQNQQT

SEQ ID NO: 232 - protein, 14 aa, synthetic construct
GSITLIPSGQNQQT

SEQ ID NO: 233 - protein, 14 aa, synthetic construct
GSNGFTALGQNQQT

SEQ ID NO: 234 - protein, 14 aa, synthetic construct
GSGHSSHSVQNQQT

SEQ ID NO: 235 - protein, 14 aa, synthetic construct
GSGIPQRSGKNQQT

SEQ ID NO: 236 - protein, 14 aa, synthetic construct
GSGDTLHMLQNQQT

SEQ ID NO: 237 - protein, 14 aa, synthetic construct
GERHTVLSGQNQQT

SEQ ID NO: 238 - protein, 14 aa, synthetic construct
GSGMPQSHIQNQQT

SEQ ID NO: 239 - protein, 14 aa, synthetic construct
GSGQLSGIGGNQQT

SEQ ID NO: 240 - protein, 14 aa, synthetic construct
GSGQNRKPASFAQT

SEQ ID NO: 241 - protein, 14 aa, synthetic construct
GSGSVSQLGQNQQT

SEQ ID NO: 242 - protein, 14 aa, synthetic construct
GSDFLGTHGQNQQT

SEQ ID NO: 243 - protein, 14 aa, synthetic construct
GQIVQNPSGQNQQT

SEQ ID NO: 244 - protein, 14 aa, synthetic construct
GSGTQIPSQQNQQT

SEQ ID NO: 245 - protein, 14 aa, synthetic construct
GSGQNQQSAREGLT

SEQ ID NO: 246 - protein, 14 aa, synthetic construct
GSGLGMSTGQNQQT

SEQ ID NO: 247 - protein, 14 aa, synthetic construct
GSGLPVLSGQNQQT

SEQ ID NO: 248 - protein, 14 aa, synthetic construct
GSGHSIRTDQNQQT

SEQ ID NO: 249 - protein, 14 aa, synthetic construct
GSGQSVQTVVNQQT

SEQ ID NO: 250 - protein, 14 aa, synthetic construct
GSGQNRAQSRFQQT

SEQ ID NO: 251 - protein, 14 aa, synthetic construct
GGGDLGRSSQNQQT

SEQ ID NO: 252 - protein, 14 aa, synthetic construct
GGGTKMDSGQNQQT

SEQ ID NO: 253 - protein, 14 aa, synthetic construct
GSGSPHPSRQNQQT

SEQ ID NO: 254 - protein, 14 aa, synthetic construct
GSGQFTNAGMNQQT

SEQ ID NO: 255 - protein, 14 aa, synthetic construct
GGRNGHTVGQNQQT

SEQ ID NO: 256 - protein, 14 aa, synthetic construct
GSGFGPQTGQNQQT

SEQ ID NO: 257 - protein, 14 aa, synthetic construct
GRTDSHTSGQNQQT

SEQ ID NO: 258 - protein, 14 aa, synthetic construct
GYEVLGSSGQNQQT

SEQ ID NO: 259 - protein, 14 aa, synthetic construct
GSVHLSVTGQNQQT

SEQ ID NO: 260 - protein, 14 aa, synthetic construct
GFMSYKGSGQNQQT

SEQ ID NO: 261 - protein, 14 aa, synthetic construct
GNIAGSVSGQNQQT

SEQ ID NO: 262 - protein, 14 aa, synthetic construct
GSGSHRDVSQNQQT

SEQ ID NO: 263 - protein, 14 aa, synthetic construct
GGLGSMSSGQNQQT

SEQ ID NO: 264 - protein, 14 aa, synthetic construct
GSGHLPQSAQNQQT

SEQ ID NO: 265 - protein, 14 aa, synthetic construct
GGVLVGGSGQNQQT

SEQ ID NO: 266 - protein, 14 aa, synthetic construct
GTHPYTSSGQNQQT

SEQ ID NO: 267 - protein, 14 aa, synthetic construct
GSGQNQQLKENRST

SEQ ID NO: 268 - protein, 14 aa, synthetic construct
GSGQNQQTSPHNHT

SEQ ID NO: 269 - protein, 14 aa, synthetic construct
GSGTLYPQSQNQQT

SEQ ID NO: 270 - protein, 14 aa, synthetic construct
GSGQNQQSNWITKT

SEQ ID NO: 271 - protein, 14 aa, synthetic construct
GSGYTSLFLQNQQT

SEQ ID NO: 272 - protein, 14 aa, synthetic construct
GSGVMTHVLQNQQT

SEQ ID NO: 273 - protein, 14 aa, synthetic construct
GSVSDVRAGQNQQT

SEQ ID NO: 274 - protein, 14 aa, synthetic construct
GSGQSHMATLNQQT

SEQ ID NO: 275 - protein, 14 aa, synthetic construct
GSGLSVHLAQNQQT

SEQ ID NO: 276 - protein, 14 aa, synthetic construct
GSGLSHATQQNQQT

SEQ ID NO: 277 - protein, 14 aa, synthetic construct
GSGLSVQSGQNQQT

SEQ ID NO: 278 - protein, 14 aa, synthetic construct
GSGHMTYREKNQQT

SEQ ID NO: 279 - protein, 14 aa, synthetic construct
GSKGVPTPGQNQQT

SEQ ID NO: 280 - protein, 14 aa, synthetic construct
GSGLLPLSSQNQQT

SEQ ID NO: 281 - protein, 14 aa, synthetic construct
GNGLYAVSGQNQQT

SEQ ID NO: 282 - protein, 14 aa, synthetic construct
GFNGSPSSGQNQQT

SEQ ID NO: 283 - protein, 14 aa, synthetic construct
GSGQIRHSDQNQQT

SEQ ID NO: 284 - protein, 14 aa, synthetic construct
GGQVAPSSGQNQQT

SEQ ID NO: 285 - protein, 14 aa, synthetic construct
GSFSMHTHGQNQQT

SEQ ID NO: 286 - protein, 14 aa, synthetic construct
GSGQNQQVIQGSNT

SEQ ID NO: 287 - protein, 14 aa, synthetic construct
GRVLHSHAGQNQQT

SEQ ID NO: 288 - protein, 14 aa, synthetic construct
GSGQNQQTSLQDQT

SEQ ID NO: 289 - protein, 14 aa, synthetic construct
GSGLGRAPVQNQQT

SEQ ID NO: 290 - protein, 14 aa, synthetic construct
GNGFSSASGQNQQT

SEQ ID NO: 291 - protein, 14 aa, synthetic construct
GSGQMASRESNQQT

SEQ ID NO: 292 - protein, 14 aa, synthetic construct
GPGLPNHSGQNQQT

SEQ ID NO: 293 - protein, 14 aa, synthetic construct
GNIQWQGSGQNQQT

SEQ ID NO: 294 - protein, 14 aa, synthetic construct
GMSAHMSSGQNQQT

SEQ ID NO: 295 - protein, 14 aa, synthetic construct
GHSFVNRSGQNQQT

SEQ ID NO: 296 - protein, 14 aa, synthetic construct
GRAVMDHSGQNQQT

SEQ ID NO: 297 - protein, 14 aa, synthetic construct
GALTVMQSGQNQQT

SEQ ID NO: 298 - protein, 14 aa, synthetic construct
GSGQRSPVLPNQQT

SEQ ID NO: 299 - protein, 14 aa, synthetic construct
GSGQNGHLSLKQQT

SEQ ID NO: 300 - protein, 14 aa, synthetic construct
GSLPRGTSDQNQQT

SEQ ID NO: 301 - protein, 14 aa, synthetic construct
GVAGSLVSGQNQQT

SEQ ID NO: 302 - protein, 14 aa, synthetic construct
GRGGIPQSGQNQQT

SEQ ID NO: 303 - protein, 14 aa, synthetic construct
GSGQYASSIPNQQT

SEQ ID NO: 304 - protein, 14 aa, synthetic construct
GTDFGRQSSQNQQT

SEQ ID NO: 305 - protein, 14 aa, synthetic construct
GIFMQTPSGQNQQT

SEQ ID NO: 306 - protein, 14 aa, synthetic construct
GSGQNQQTRLVDLT

SEQ ID NO: 307 - protein, 14 aa, synthetic construct
GTREMPLSGQNQQT

SEQ ID NO: 308 - protein, 14 aa, synthetic construct
GSRLVHVHGQNQQT

SEQ ID NO: 309 - protein, 14 aa, synthetic construct
GSGRLVPNGPNQQT

SEQ ID NO: 310 - protein, 14 aa, synthetic construct
GSGYLRESPQNQQT

SEQ ID NO: 311 - protein, 14 aa, synthetic construct
GARIQNASGQKQQT

SEQ ID NO: 312 - protein, 14 aa, synthetic construct
GLSNPMPSGQNQQT

SEQ ID NO: 313 - protein, 14 aa, synthetic construct
GSTVQDTRGQNQQT

SEQ ID NO: 314 - protein, 14 aa, synthetic construct
GPFGMPSSGQNQQT

SEQ ID NO: 315 - protein, 14 aa, synthetic construct
GSGQNHGVLSNQQT

SEQ ID NO: 316 - protein, 14 aa, synthetic construct
GSGYSMSQAQNQQT

SEQ ID NO: 317 - protein, 14 aa, synthetic construct
GSGMLTHTLQNQQT

SEQ ID NO: 318 - protein, 14 aa, synthetic construct
GRGSPHASRQNQQT

SEQ ID NO: 319 - protein, 14 aa, synthetic construct
GLSWPSTSGQNQQT

SEQ ID NO: 320 - protein, 14 aa, synthetic construct
GNSMERTSGQNQQT

SEQ ID NO: 321 - protein, 14 aa, synthetic construct
GSGMSPSTLQNQQT

SEQ ID NO: 322 - protein, 14 aa, synthetic construct
GSGHGQVLSQNQQT

SEQ ID NO: 323 - protein, 14 aa, synthetic construct
GRGQIYSTGGNQQT

SEQ ID NO: 324 - protein, 14 aa, synthetic construct
GVVAAHNSGQNQQT

SEQ ID NO: 325 - protein, 14 aa, synthetic construct
GDSSLRHSGQNQQT

SEQ ID NO: 326 - protein, 14 aa, synthetic construct
GSLVSQGAGQNQQT

SEQ ID NO: 327 - protein, 14 aa, synthetic construct
GSLLQAHSGQNQQT

SEQ ID NO: 328 - protein, 14 aa, synthetic construct
GSGHIYVGIQNQQT

SEQ ID NO: 329 - protein, 14 aa, synthetic construct
GHHTTVQSGQNQQT

SEQ ID NO: 330 - protein, 14 aa, synthetic construct
GSRQSKRNELNQQT

SEQ ID NO: 331 - protein, 14 aa, synthetic construct
GSGQNQQHVSSPRT

SEQ ID NO: 332 - protein, 14 aa, synthetic construct
GSSKELLWGQNQQT

SEQ ID NO: 333 - protein, 14 aa, synthetic construct
GSLSTPSSGQNQQT

SEQ ID NO: 334 - protein, 14 aa, synthetic construct
GSIGYAGQGQNQQT

SEQ ID NO: 335 - protein, 14 aa, synthetic construct
GSGQNQRVSNSQQT

SEQ ID NO: 336 - protein, 14 aa, synthetic construct
GSGYASHVQQNQQT

SEQ ID NO: 337 - protein, 14 aa, synthetic construct
GSGEYSRSGQNQQT

SEQ ID NO: 338 - protein, 14 aa, synthetic construct
GSVSTHSSGQNQQT

SEQ ID NO: 339 - protein, 14 aa, synthetic construct
GSGQNQHSLGNYQT

SEQ ID NO: 340 - protein, 14 aa, synthetic construct
GSGGLDTRGQNQQT

SEQ ID NO: 341 - protein, 14 aa, synthetic construct
GNILHATSGQNQQT

SEQ ID NO: 342 - protein, 14 aa, synthetic construct
GSGQSYTMTQNQQT

SEQ ID NO: 343 - protein, 14 aa, synthetic construct
GSGQNQHSAPNSQT

SEQ ID NO: 344 - protein, 14 aa, synthetic construct
GSGQNQQTMDHNRT

SEQ ID NO: 345 - protein, 14 aa, synthetic construct
GSNGGVGTGQNQQT

SEQ ID NO: 346 - protein, 14 aa, synthetic construct
GAGSIIPSGQNQQT

SEQ ID NO: 347 - protein, 14 aa, synthetic construct
GSGQTHGGQHNQQT

SEQ ID NO: 348 - protein, 14 aa, synthetic construct
GSNLSFQSGQNQQT

SEQ ID NO: 349 - protein, 14 aa, synthetic construct
GATLQVHSGQNQQT

SEQ ID NO: 350 - protein, 14 aa, synthetic construct
GSGFNQRSEQNQQT

SEQ ID NO: 351 - protein, 14 aa, synthetic construct
GSGSLRDFDQNQQT

SEQ ID NO: 352 - protein, 14 aa, synthetic construct
GSGDSITGKQNQQT

SEQ ID NO: 353 - protein, 14 aa, synthetic construct
GSGQDRNIVQNQQT

SEQ ID NO: 354 - protein, 14 aa, synthetic construct
GSGLSHSHQQNQQT

SEQ ID NO: 355 - protein, 14 aa, synthetic construct
GSGQNQQTGMSSVK

SEQ ID NO: 356 - protein, 14 aa, synthetic construct
GSVTHGISGQNQQT

SEQ ID NO: 357 - protein, 14 aa, synthetic construct
GVVAHQPSGQNQQT

SEQ ID NO: 358 - protein, 14 aa, synthetic construct
GSGPILGQLQNQQT

SEQ ID NO: 359 - protein, 14 aa, synthetic construct
GSGHVPNSGLNQQT

SEQ ID NO: 360 - protein, 14 aa, synthetic construct
GDAGVRSSGQNQQT

SEQ ID NO: 361 - protein, 14 aa, synthetic construct
GSGSQLMSLQNQQT

SEQ ID NO: 362 - protein, 14 aa, synthetic construct
GSGLDYSQRQNQQT

SEQ ID NO: 363 - protein, 14 aa, synthetic construct
GSGQSSGRLINKQT

SEQ ID NO: 364 - protein, 14 aa, synthetic construct
GSSVSPSSGQNQQT

SEQ ID NO: 365 - protein, 14 aa, synthetic construct
GSGQVVGLSGNQQT

SEQ ID NO: 366 - protein, 14 aa, synthetic construct
GSNMGVPLGQNQQT

SEQ ID NO: 367 - protein, 14 aa, synthetic construct
GSFYPSSTGQNQQT

SEQ ID NO: 368 - protein, 14 aa, synthetic construct
GSGQNQQTRLTDLT

SEQ ID NO: 369 - protein, 14 aa, synthetic construct
GPTNGRSSGQNQQT

SEQ ID NO: 370 - protein, 14 aa, synthetic construct
GSGLLHGKLQNQQT

SEQ ID NO: 371 - protein, 14 aa, synthetic construct
GANMGHVSGQNQQT

SEQ ID NO: 372 - protein, 14 aa, synthetic construct
GSGQNQQSGRGDLT

SEQ ID NO: 373 - protein, 14 aa, synthetic construct
GSHGHYASGQKQQT

SEQ ID NO: 374 - protein, 14 aa, synthetic construct
GSGDLRISPQNQQT

SEQ ID NO: 375 - protein, 14 aa, synthetic construct
GSGMPVILGQNQQT

SEQ ID NO: 376 - protein, 14 aa, synthetic construct
GRGVITSSGQNHQT

SEQ ID NO: 377 - protein, 14 aa, synthetic construct
GSGHSVSGPQNQQT

SEQ ID NO: 378 - protein, 14 aa, synthetic construct
GSRNGHTVGRNQQT

SEQ ID NO: 379 - protein, 14 aa, synthetic construct
GAGVHMVSGQNQQT

SEQ ID NO: 380 - protein, 14 aa, synthetic construct
GSGQNHRPSVLQQT

SEQ ID NO: 381 - protein, 14 aa, synthetic construct
GSGSPRDSIQNQQT

SEQ ID NO: 382 - protein, 14 aa, synthetic construct
GSGQGIHSSVNQQT

SEQ ID NO: 383 - protein, 14 aa, synthetic construct
GSGQQLSITPNQQT

SEQ ID NO: 384 - protein, 14 aa, synthetic construct
GGYHSQTSGQNQQT

SEQ ID NO: 385 - protein, 14 aa, synthetic construct
GSLHHDNHGQNQQT

SEQ ID NO: 386 - protein, 14 aa, synthetic construct
GIMARDSSGQNQQT

SEQ ID NO: 387 - protein, 14 aa, synthetic construct
GVVHITNSGQNQQT

SEQ ID NO: 388 - protein, 14 aa, synthetic construct
GSGQNQHSAPFNQT

SEQ ID NO: 389 - protein, 14 aa, synthetic construct
GSGQTSGLKQNQQT

SEQ ID NO: 390 - protein, 14 aa, synthetic construct
GSGQNQQTSLSNTA

SEQ ID NO: 391 - protein, 14 aa, synthetic construct
GSGQNQAVHNKSQT

SEQ ID NO: 392 - protein, 14 aa, synthetic construct
GVHTHLPSGQNQQT

SEQ ID NO: 393 - protein, 14 aa, synthetic construct
GHLTMHNSGQNHQT

SEQ ID NO: 394 - protein, 14 aa, synthetic construct
GSGSSSRPYQNQQT

SEQ ID NO: 395 - protein, 14 aa, synthetic construct
GILLATPSGQNQQT

SEQ ID NO: 396 - protein, 14 aa, synthetic construct
GSGQNAGSFPNQQT

SEQ ID NO: 397 - protein, 14 aa, synthetic construct
GSRDGHTVGQNQQT

SEQ ID NO: 398 - protein, 14 aa, synthetic construct
GSLLISTSGQNQQT

SEQ ID NO: 399 - protein, 14 aa, synthetic construct
GSGAMPSHGQNQQT

SEQ ID NO: 400 - protein, 14 aa, synthetic construct
GALVSPISGQNQQT

SEQ ID NO: 401 - protein, 14 aa, synthetic construct
GSLSSHGVGQNQQT

SEQ ID NO: 402 - protein, 14 aa, synthetic construct
GSGQNQQASLAMRT

SEQ ID NO: 403 - protein, 14 aa, synthetic construct
GPGLGSHSGQNQQT

SEQ ID NO: 404 - protein, 14 aa, synthetic construct
GHDSQHKSGQNQQT

SEQ ID NO: 405 - protein, 14 aa, synthetic construct
GSGLTLSATQNQQT

SEQ ID NO: 406 - protein, 14 aa, synthetic construct
GSGQVVAHVGNQQT

SEQ ID NO: 407 - protein, 14 aa, synthetic construct
GSGLRTMTTQNQQT

SEQ ID NO: 408 - protein, 14 aa, synthetic construct
GSGQVGRLLQNQQT

SEQ ID NO: 409 - protein, 14 aa, synthetic construct
GSGQLSHQSVNQQT

SEQ ID NO: 410 - protein, 14 aa, synthetic construct
GSGDRYQTLQNQQT

SEQ ID NO: 411 - protein, 14 aa, synthetic construct
GSGQNQQLKSSAQT

SEQ ID NO: 412 - protein, 14 aa, synthetic construct
GSGQNQYSIPVAQT

SEQ ID NO: 413 - protein, 14 aa, synthetic construct
GSGERLHLTQNQQT

SEQ ID NO: 414 - protein, 14 aa, synthetic construct
GSGHNQQVRTAPNT

SEQ ID NO: 415 - protein, 14 aa, synthetic construct
GGLSHVMSGQNQQT

SEQ ID NO: 416 - protein, 14 aa, synthetic construct
GSGQSHRDVLNQQT

SEQ ID NO: 417 - protein, 14 aa, synthetic construct
GSGQNLAGRMDQQT

SEQ ID NO: 418 - protein, 14 aa, synthetic construct
GSGQNQQTNRGNPM

SEQ ID NO: 419 - protein, 14 aa, synthetic construct
GSGQSYQRDHNQQT

SEQ ID NO: 420 - protein, 14 aa, synthetic construct
GSLLSAGMGQNQHT

SEQ ID NO: 421 - protein, 14 aa, synthetic construct
GSGQNQQTAIYRNI

SEQ ID NO: 422 - protein, 14 aa, synthetic construct
GSGQNQQTSGTTNC

SEQ ID NO: 423 - protein, 14 aa, synthetic construct
GMTSHSVSGQNQQT

SEQ ID NO: 424 - protein, 14 aa, synthetic construct
GSSQSTGYQPNQQT

SEQ ID NO: 425 - protein, 14 aa, synthetic construct
GSLKPTTLGQNQQT

SEQ ID NO: 426 - protein, 14 aa, synthetic construct
GRMFSLGSGQNQQT

SEQ ID NO: 427 - protein, 14 aa, synthetic construct
GSGQNQQTALGVKC

SEQ ID NO: 428 - protein, 14 aa, synthetic construct
GAMVSHSSGQNQQT

SEQ ID NO: 429 - protein, 14 aa, synthetic construct
GSGQNQQRNSDSVT

SEQ ID NO: 430 - protein, 14 aa, synthetic construct
GSGQSMTLHLNQQT

SEQ ID NO: 431 - protein, 14 aa, synthetic construct
GSGQVHQAEVNQQT

SEQ ID NO: 432 - protein, 14 aa, synthetic construct
GSGQNQSQNHLQQT

SEQ ID NO: 433 - protein, 14 aa, synthetic construct
GSLLTTASGQNQQT

SEQ ID NO: 434 - protein, 14 aa, synthetic construct
GSGLIRTAAQNQQT

SEQ ID NO: 435 - protein, 14 aa, synthetic construct
GSGQNQQTVSRQST

SEQ ID NO: 436 - protein, 14 aa, synthetic construct
GSGQYANHGINQQT

SEQ ID NO: 437 - protein, 14 aa, synthetic construct
GSRSTGPSGQNQQT

SEQ ID NO: 438 - protein, 14 aa, synthetic construct
GRGVQQKLQQNQQT

SEQ ID NO: 439 - protein, 14 aa, synthetic construct
GSGQNQQVHLSTGT

SEQ ID NO: 440 - protein, 14 aa, synthetic construct
GSGQNQQLSAKSST

SEQ ID NO: 441 - protein, 14 aa, synthetic construct
GSGYKAARPQNQQT

SEQ ID NO: 442 - protein, 14 aa, synthetic construct
GSAGISPSGQNQQT

SEQ ID NO: 443 - protein, 14 aa, synthetic construct
GSGQNRAHAFLQQT

SEQ ID NO: 444 - protein, 14 aa, synthetic construct
GSGLSGITMQNQQT

SEQ ID NO: 445 - protein, 14 aa, synthetic construct
GPGSAHSSGQNQQT

SEQ ID NO: 446 - protein, 14 aa, synthetic construct
GSSHTQALGQNQQT

SEQ ID NO: 447 - protein, 14 aa, synthetic construct
GSGVHGVSSQNQQT

SEQ ID NO: 448 - protein, 14 aa, synthetic construct
GSSGRDMGGQNQQT

SEQ ID NO: 449 - protein, 14 aa, synthetic construct
GERAFPTSGQNQQT

SEQ ID NO: 450 - protein, 14 aa, synthetic construct
GGRIVSLSGQNQQT

SEQ ID NO: 451 - protein, 14 aa, synthetic construct
GSGQNSYSHTSQQT

SEQ ID NO: 452 - protein, 14 aa, synthetic construct
GLGYPGSSGQNQQT

SEQ ID NO: 453 - protein, 14 aa, synthetic construct
GSGPQSHTGQNQQT

SEQ ID NO: 454 - protein, 14 aa, synthetic construct
GSGQNQQLSRDAST

SEQ ID NO: 455 - protein, 14 aa, synthetic construct
GSGQILHSVPNQQT

SEQ ID NO: 456 - protein, 14 aa, synthetic construct
GSGFHTDSRQNQQT

SEQ ID NO: 457 - protein, 14 aa, synthetic construct
GSGQSHSLATNQQT

SEQ ID NO: 458 - protein, 14 aa, synthetic construct
GSGQNQQTLSKPWT

SEQ ID NO: 459 - protein, 14 aa, synthetic construct
GSGHAAISQQNQQT

SEQ ID NO: 460 - protein, 14 aa, synthetic construct
GSGQNQQQIGGNST

SEQ ID NO: 461 - protein, 14 aa, synthetic construct
GGGPMAGSGQNQQT

SEQ ID NO: 462 - protein, 14 aa, synthetic construct
GMRMEYQSGQNQQT

SEQ ID NO: 463 - protein, 14 aa, synthetic construct
GSGQNQQGTLLHQT

SEQ ID NO: 464 - protein, 14 aa, synthetic construct
GSGQNQRSSGGVQT

SEQ ID NO: 465 - protein, 14 aa, synthetic construct
GSGQNQRGALATQT

SEQ ID NO: 466 - protein, 14 aa, synthetic construct
GSGTVHAATQNQQT

SEQ ID NO: 467 - protein, 14 aa, synthetic construct
GSRMTQQFGQNQQT

SEQ ID NO: 468 - protein, 14 aa, synthetic construct
GSSSPGASGQNQQT

SEQ ID NO: 469 - protein, 14 aa, synthetic construct
GHPSPHVSGQNQQT

SEQ ID NO: 470 - protein, 14 aa, synthetic construct
GSGSHHASRQNQQT

SEQ ID NO: 471 - protein, 14 aa, synthetic construct
GAVGHSYSGQNQQT

SEQ ID NO: 472 - protein, 14 aa, synthetic construct
GSRSQYDIGQNQQT

SEQ ID NO: 473 - protein, 14 aa, synthetic construct
GSGQGPQERGNQQT

SEQ ID NO: 474 - protein, 14 aa, synthetic construct
GSIAHVGTGQNQQT

SEQ ID NO: 475 - protein, 14 aa, synthetic construct
GSGQNQQKQNHGNT

SEQ ID NO: 476 - protein, 14 aa, synthetic construct
GSGQNQQALGSQRT

SEQ ID NO: 477 - protein, 14 aa, synthetic construct
GSGAITHMPQNQQT

SEQ ID NO: 478 - protein, 14 aa, synthetic construct
GSGQRNPLLLNQQT

SEQ ID NO: 479 - protein, 14 aa, synthetic construct
GSSGIPVSHQNQQT

SEQ ID NO: 480 - protein, 14 aa, synthetic construct
GVHSLTPSGQNQQT

SEQ ID NO: 481 - protein, 14 aa, synthetic construct
GVIVLHGSGQNQQT

SEQ ID NO: 482 - protein, 14 aa, synthetic construct
GGTRVVDSGQNQQT

SEQ ID NO: 483 - protein, 14 aa, synthetic construct
GSGGVTYQSQNQQT

SEQ ID NO: 484 - protein, 14 aa, synthetic construct
GSGQNQAGHGPGQT

SEQ ID NO: 485 - protein, 14 aa, synthetic construct
GSGQLVTSGPNQQT

SEQ ID NO: 486 - protein, 14 aa, synthetic construct
GSGIAAQRTQNQQT

SEQ ID NO: 487 - protein, 14 aa, synthetic construct
GSTPAGVGGQNQQT

SEQ ID NO: 488 - protein, 14 aa, synthetic construct
GSGQNQQTSTGVHS

SEQ ID NO: 489 - protein, 14 aa, synthetic construct
GSGQIRQLVDNQQT

SEQ ID NO: 490 - protein, 14 aa, synthetic construct
GSLIGMQSGQNQQT

SEQ ID NO: 491 - protein, 14 aa, synthetic construct
GSGQIKGKMDNQQT

SEQ ID NO: 492 - protein, 14 aa, synthetic construct
GSGSDMSSWQNQQT

SEQ ID NO: 493 - protein, 14 aa, synthetic construct
GRGQNQQHTGLATT

SEQ ID NO: 494 - protein, 14 aa, synthetic construct
GSGQNQQTLYSSNT

SEQ ID NO: 495 - protein, 14 aa, synthetic construct
GSGQTQVLKSNQQT

SEQ ID NO: 496 - protein, 14 aa, synthetic construct
GSRTLSNVGQNQQT

SEQ ID NO: 497 - protein, 14 aa, synthetic construct
GSGVQHSLPQNQQT

SEQ ID NO: 498 - protein, 14 aa, synthetic construct
GNYLHQASGQNQQT

SEQ ID NO: 499 - protein, 14 aa, synthetic construct
GSGGTSVHQQNQQT

SEQ ID NO: 500 - protein, 14 aa, synthetic construct
GMDHSRPSGQNQQT

SEQ ID NO: 501 - protein, 14 aa, synthetic construct
GSGQNQQSMGTFTT

SEQ ID NO: 502 - protein, 14 aa, synthetic construct
GSGQNQQTPLRPPT

SEQ ID NO: 503 - protein, 14 aa, synthetic construct
GSGQNQHHSVSQQT

SEQ ID NO: 504 - protein, 14 aa, synthetic construct
GSGQLRSLSTNQQT

SEQ ID NO: 505 - protein, 14 aa, synthetic construct
GSGSPRQLSQNQQT

SEQ ID NO: 506 - protein, 14 aa, synthetic construct
GSGQNQQTTASSHT

SEQ ID NO: 507 - protein, 14 aa, synthetic construct
GRGQVVSTHQNQQT

SEQ ID NO: 508 - protein, 14 aa, synthetic construct
GSAQVSMVGQNQQT

SEQ ID NO: 509 - protein, 14 aa, synthetic construct
GSSTLVTIGKNQQT

SEQ ID NO: 510 - protein, 14 aa, synthetic construct
GFAHQASSGQNQQT

SEQ ID NO: 511 - protein, 14 aa, synthetic construct
GSGQPVLSISNQQT

SEQ ID NO: 512 - protein, 14 aa, synthetic construct
GSGQSHRSELNQQT

SEQ ID NO: 513 - protein, 14 aa, synthetic construct
GSSVGSPIGQNQQT

SEQ ID NO: 514 - protein, 14 aa, synthetic construct
GSGMPIRNVQNQQT

SEQ ID NO: 515 - protein, 14 aa, synthetic construct
GSSTRVDSGQNQQT

SEQ ID NO: 516 - protein, 14 aa, synthetic construct
GSGQNQQTAMRSTT

SEQ ID NO: 517 - protein, 14 aa, synthetic construct
GSGQNQQHSSSHLT

SEQ ID NO: 518 - protein, 14 aa, synthetic construct
GSRNGHAVGQNQQT

SEQ ID NO: 519 - protein, 14 aa, synthetic construct
GLGAYQSSGQNQQT

SEQ ID NO: 520 - protein, 14 aa, synthetic construct
GPGLSGHSGQNQQT

SEQ ID NO: 521 - protein, 14 aa, synthetic construct
GSTGIVSSGQNQQT

SEQ ID NO: 522 - protein, 14 aa, synthetic construct
GSRTTQVIGQNQQT

SEQ ID NO: 523 - protein, 14 aa, synthetic construct
GSGLLHRAQQNQQT

SEQ ID NO: 524 - protein, 14 aa, synthetic construct
GSGQNAQQAAAQQT

SEQ ID NO: 525 - protein, 14 aa, synthetic construct
GSGQNQQSALRTQT

SEQ ID NO: 526 - protein, 14 aa, synthetic construct
GSGFLSDTRQNQQT

SEQ ID NO: 527 - protein, 14 aa, synthetic construct
GSGLLYHDQQNQQT

SEQ ID NO: 528 - protein, 14 aa, synthetic construct
GSGQNQHYSLHKQT

SEQ ID NO: 529 - protein, 14 aa, synthetic construct
GSGHSPLPQQNQQT

SEQ ID NO: 530 - protein, 14 aa, synthetic construct
GNGHSMRPNQNQQT

SEQ ID NO: 531 - protein, 14 aa, synthetic construct
GSGLKWSTLQNQQT

SEQ ID NO: 532 - protein, 14 aa, synthetic construct
GSGQMGRQAVNQQT

SEQ ID NO: 533 - protein, 14 aa, synthetic construct
GSGQNQQTSGVLTL

SEQ ID NO: 534 - protein, 14 aa, synthetic construct
GSGQNQQALHNPHT

SEQ ID NO: 535 - protein, 14 aa, synthetic construct
GSGQNQQVIPNSKT

SEQ ID NO: 536 - protein, 14 aa, synthetic construct
GSPLQDRVGQNQQT

SEQ ID NO: 537 - protein, 14 aa, synthetic construct
GSGQNQYSSTNPQT

SEQ ID NO: 538 - protein, 14 aa, synthetic construct
GAMTVTISGQNQQT

SEQ ID NO: 539 - protein, 14 aa, synthetic construct
GSGQNQQLQTLIRT

SEQ ID NO: 540 - protein, 14 aa, synthetic construct
GSGLRQTSQQNQQT

SEQ ID NO: 541 - protein, 14 aa, synthetic construct
GSGQNQQTGLRQQT

SEQ ID NO: 542 - protein, 14 aa, synthetic construct
GSGQTRQMKDNQQT

SEQ ID NO: 543 - protein, 14 aa, synthetic construct
GSGQNHGLQSGQQT

SEQ ID NO: 544 - protein, 14 aa, synthetic construct
GSGQSHRQPENQQT

SEQ ID NO: 545 - protein, 14 aa, synthetic construct
GSGQDRHIVQNQQT

SEQ ID NO: 546 - protein, 14 aa, synthetic construct
GSGQNQQLPHSNLT

SEQ ID NO: 547 - protein, 14 aa, synthetic construct
GSGQLSVPYDNQQT

SEQ ID NO: 548 - protein, 14 aa, synthetic construct
GSGRNPQTQPLQQT

SEQ ID NO: 549 - protein, 14 aa, synthetic construct
GSGQPYSTGLNQQT

SEQ ID NO: 550 - protein, 14 aa, synthetic construct
GSGQNQQTHGGLRD

SEQ ID NO: 551 - protein, 14 aa, synthetic construct
GAYGMVSSGQNQQT

SEQ ID NO: 552 - protein, 14 aa, synthetic construct
GSGIQSSYSQNQQT

SEQ ID NO: 553 - protein, 14 aa, synthetic construct
GPRLSDQSGQNQQT

SEQ ID NO: 554 - protein, 14 aa, synthetic construct
GSGQNQQTHPSPCT

SEQ ID NO: 555 - protein, 14 aa, synthetic construct
GSGQSFQMHTNQQT

SEQ ID NO: 556 - protein, 14 aa, synthetic construct
GSGQNQQTGNPKHT

SEQ ID NO: 557 - protein, 14 aa, synthetic construct
GFSSAVHSGQNQQT

SEQ ID NO: 558 - protein, 14 aa, synthetic construct
GSGQNQQTSMSNAT

SEQ ID NO: 559 - protein, 14 aa, synthetic construct
GSGQDMKQHHNQQT

SEQ ID NO: 560 - protein, 14 aa, synthetic construct
GLRLSTPSGQNQQT

SEQ ID NO: 561 - protein, 14 aa, synthetic construct
GSGQNQQTSVYMNT

SEQ ID NO: 562 - protein, 14 aa, synthetic construct
GSGQNQYSQSSMQT

SEQ ID NO: 563 - protein, 14 aa, synthetic construct
GSGQNQQSMADHTT

SEQ ID NO: 564 - protein, 14 aa, synthetic construct
GWERSFVSGQNQQT

SEQ ID NO: 565 - protein, 14 aa, synthetic construct
GLLAGKSSGQNQQT

SEQ ID NO: 566 - protein, 14 aa, synthetic construct
GKSFVPQSGQNQQT

SEQ ID NO: 567 - protein, 14 aa, synthetic construct
GSGQMQSAGSNQQT

SEQ ID NO: 568 - protein, 14 aa, synthetic construct
GSDQNQRLTSSMQT

SEQ ID NO: 569 - protein, 14 aa, synthetic construct
GESRAVLSGQNQQT

SEQ ID NO: 570 - protein, 14 aa, synthetic construct
GSVFGVPSGQNQQT

SEQ ID NO: 571 - protein, 14 aa, synthetic construct
GSGLPDRNLQNQQT

SEQ ID NO: 572 - protein, 14 aa, synthetic construct
GSGTHNSAIQNQQT

SEQ ID NO: 573 - protein, 14 aa, synthetic construct
GSGMIIASMQNQQT

SEQ ID NO: 574 - protein, 14 aa, synthetic construct
GGITWTDSGQNQQT

SEQ ID NO: 575 - protein, 14 aa, synthetic construct
GSGQNQQASGRQQT

SEQ ID NO: 576 - protein, 14 aa, synthetic construct
GSGQNQQPHLKSLT

SEQ ID NO: 577 - protein, 14 aa, synthetic construct
GPPQHMTSGQNQQT

SEQ ID NO: 578 - protein, 14 aa, synthetic construct
GSGQNQQASLPSRT

SEQ ID NO: 579 - protein, 14 aa, synthetic construct
GSGQIVSTQTNQQT

SEQ ID NO: 580 - protein, 14 aa, synthetic construct
GSGKGHSAGQNQQT

SEQ ID NO: 581 - protein, 14 aa, synthetic construct
GSGQNTRLQLGQQT

SEQ ID NO: 582 - protein, 14 aa, synthetic construct
GSVGSRPVGQNQQT

SEQ ID NO: 583 - protein, 14 aa, synthetic construct
GSSHTLALGQNQQT

SEQ ID NO: 584 - protein, 14 aa, synthetic construct
GMYEYSQSGQNQQT

SEQ ID NO: 585 - protein, 14 aa, synthetic construct
GNGQNQQHSILHGT

SEQ ID NO: 586 - protein, 14 aa, synthetic construct
GSGYNQPHLQNQQT

SEQ ID NO: 587 - protein, 14 aa, synthetic construct
GPLVNASSGQNQQT

SEQ ID NO: 588 - protein, 14 aa, synthetic construct
GSGQNQQVLTTART

SEQ ID NO: 589 - protein, 14 aa, synthetic construct
GSGQNQHSVHNDQT

SEQ ID NO: 590 - protein, 14 aa, synthetic construct
GAGLIMHSGQNQQT

SEQ ID NO: 591 - protein, 14 aa, synthetic construct
GMGRHSASGQNQQT

SEQ ID NO: 592 - protein, 14 aa, synthetic construct
GSHSQSGHGQNQQT

SEQ ID NO: 593 - protein, 14 aa, synthetic construct
GSSTTIVSGQNHQT

SEQ ID NO: 594 - protein, 14 aa, synthetic construct
GRHLVTASGQNQQT

SEQ ID NO: 595 - protein, 14 aa, synthetic construct
GSGQNQQHANLNQT

SEQ ID NO: 596 - protein, 14 aa, synthetic construct
GSGSTHSKAQNQQT

SEQ ID NO: 597 - protein, 14 aa, synthetic construct
GSGQNKQMLSGNTT

SEQ ID NO: 598 - protein, 14 aa, synthetic construct
GSGQVHNPTQNQQT

SEQ ID NO: 599 - protein, 14 aa, synthetic construct
GSGQNQQIPHVHQT

SEQ ID NO: 600 - protein, 14 aa, synthetic construct
GSLHAGLSGQNQQT

SEQ ID NO: 601 - protein, 14 aa, synthetic construct
GPAQHGTSGQNQQT

SEQ ID NO: 602 - protein, 14 aa, synthetic construct
GEKAVTSSGQNQQT

SEQ ID NO: 603 - protein, 14 aa, synthetic construct
GSGQNQQTMANGQR

SEQ ID NO: 604 - protein, 14 aa, synthetic construct
GSGSPHSKDQNQQT

SEQ ID NO: 605 - protein, 14 aa, synthetic construct
GSFSMGYGGQNQQT

SEQ ID NO: 606 - protein, 14 aa, synthetic construct
GSGTHLVSLQNQQT

SEQ ID NO: 607 - protein, 14 aa, synthetic construct
GSGQMQPHVQNQQT

SEQ ID NO: 608 - protein, 14 aa, synthetic construct
GSGQNQQVAGLNNT

SEQ ID NO: 609 - protein, 14 aa, synthetic construct
GSSQNQQHDMRLRT

SEQ ID NO: 610 - protein, 14 aa, synthetic construct
GPASLPISGQNQQT

SEQ ID NO: 611 - protein, 14 aa, synthetic construct
GSGQNQQPPLATRT

SEQ ID NO: 612 - protein, 14 aa, synthetic construct
GSSRVPVSGQNQQT

SEQ ID NO: 613 - protein, 14 aa, synthetic construct
GSGQNQQTNLGHTT

SEQ ID NO: 614 - protein, 14 aa, synthetic construct
GSGQNQQLVSRVQT

SEQ ID NO: 615 - protein, 14 aa, synthetic construct
GPNSYPVSGQKQQT

SEQ ID NO: 616 - protein, 14 aa, synthetic construct
GHAHYQASGQNQQT

SEQ ID NO: 617 - protein, 14 aa, synthetic construct
GSGQALLSTGNQQT

SEQ ID NO: 618 - protein, 14 aa, synthetic construct
GSGQLPRQMTNQQT

SEQ ID NO: 619 - protein, 14 aa, synthetic construct
GSGFPKSTEQNQQT

SEQ ID NO: 620 - protein, 14 aa, synthetic construct
GSRETSLSGQNQQT

SEQ ID NO: 621 - protein, 14 aa, synthetic construct
GSGQNQQGTGVSHT

SEQ ID NO: 622 - protein, 14 aa, synthetic construct
GSRTVPVYGQNQQT

SEQ ID NO: 623 - protein, 14 aa, synthetic construct
GSNAQSAHGQNQQT

SEQ ID NO: 624 - protein, 14 aa, synthetic construct
GAFHLAASGQNQQT

SEQ ID NO: 625 - protein, 14 aa, synthetic construct
GSGQYRSSSDNQQT

SEQ ID NO: 626 - protein, 14 aa, synthetic construct
GSGQVYISTPNQQT

SEQ ID NO: 627 - protein, 14 aa, synthetic construct
GSGVSTQLLQNQQT

SEQ ID NO: 628 - protein, 14 aa, synthetic construct
GSGQLGLSVTNQQT

SEQ ID NO: 629 - protein, 14 aa, synthetic construct
GSGSNMRLSQNQQT

SEQ ID NO: 630 - protein, 14 aa, synthetic construct
GSGQNLHSGLPQQT

SEQ ID NO: 631 - protein, 14 aa, synthetic construct
GSSHTLALGQNKQT

SEQ ID NO: 632 - protein, 14 aa, synthetic construct
GSGQNQHSLPAHRT

SEQ ID NO: 633 - protein, 14 aa, synthetic construct
GSGQNQGTVYPNQT

SEQ ID NO: 634 - protein, 14 aa, synthetic construct
GSGQNQQPSLRQST

SEQ ID NO: 635 - protein, 14 aa, synthetic construct
GSGQNARLKDNQQT

SEQ ID NO: 636 - protein, 14 aa, synthetic construct
GHAGSTGSGQNQQT

SEQ ID NO: 637 - protein, 14 aa, synthetic construct
GSGQALSSSGNQQT

SEQ ID NO: 638 - protein, 14 aa, synthetic construct
GSGASESHRQNQQT

SEQ ID NO: 639 - protein, 14 aa, synthetic construct
GVGVITSSGQNQQT

SEQ ID NO: 640 - protein, 14 aa, synthetic construct
GSLYGQSLGQNQQT

SEQ ID NO: 641 - protein, 14 aa, synthetic construct
GSGQMSDVHGNQQT

SEQ ID NO: 642 - protein, 14 aa, synthetic construct
GSGQNQQHSSKATT

SEQ ID NO: 643 - protein, 14 aa, synthetic construct
GSGQNQQTSVSQQT

SEQ ID NO: 644 - protein, 14 aa, synthetic construct
GSGQKMWKLDNQQT

SEQ ID NO: 645 - protein, 14 aa, synthetic construct
GSGQNVSMQVNQQT

SEQ ID NO: 646 - protein, 14 aa, synthetic construct
GSGQNQRATLSNQT

SEQ ID NO: 647 - protein, 14 aa, synthetic construct
GSGQASSKSANQQT

SEQ ID NO: 648 - protein, 14 aa, synthetic construct
GSGKNQTPIPKGQT

SEQ ID NO: 649 - protein, 14 aa, synthetic construct
GSGQNQQTRQEGST

SEQ ID NO: 650 - protein, 14 aa, synthetic construct
GASSLATSGQNQQT

SEQ ID NO: 651 - protein, 14 aa, synthetic construct
GSGQRGSLTENQQT

SEQ ID NO: 652 - protein, 14 aa, synthetic construct
GSEQTRQRGQNQQT

SEQ ID NO: 653 - protein, 14 aa, synthetic construct
GSGQNQQTLTASKE

SEQ ID NO: 654 - protein, 14 aa, synthetic construct
GSGTSGKTGKNQQT

SEQ ID NO: 655 - protein, 14 aa, synthetic construct
GQLVTFTSGQNQQT

SEQ ID NO: 656 - protein, 14 aa, synthetic construct
GSGQNQQSANKILT

SEQ ID NO: 657 - protein, 14 aa, synthetic construct
GSGQNQQHHSSHTT

SEQ ID NO: 658 - protein, 14 aa, synthetic construct
GSGQNQKGMQPNQT

SEQ ID NO: 659 - protein, 14 aa, synthetic construct
GSGQLVSGLYNQQT

SEQ ID NO: 660 - protein, 14 aa, synthetic construct
GSSVGVPSGQNQQT

SEQ ID NO: 661 - protein, 14 aa, synthetic construct
GSGQNQQWDSRRQT

SEQ ID NO: 662 - protein, 14 aa, synthetic construct
GSEQTRQSGQNQQT

SEQ ID NO: 663 - protein, 14 aa, synthetic construct
GSGIGSHIPQNQQT

SEQ ID NO: 664 - protein, 14 aa, synthetic construct
GSGQNQRLHGVDQT

SEQ ID NO: 665 - protein, 14 aa, synthetic construct
GEVSRVLSGQNQQT

SEQ ID NO: 666 - protein, 14 aa, synthetic construct
GSGQNQQKVSPLLT

SEQ ID NO: 667 - protein, 14 aa, synthetic construct
GSGLALERSQNQQT

SEQ ID NO: 668 - protein, 14 aa, synthetic construct
GPDRIGSSGQNQQT

SEQ ID NO: 669 - protein, 14 aa, synthetic construct
GSGQNQDHQNKQQT

SEQ ID NO: 670 - protein, 14 aa, synthetic construct
GSGQNQQTALYNNT

SEQ ID NO: 671 - protein, 14 aa, synthetic construct
GSGAVHLTAQNQQT

SEQ ID NO: 672 - protein, 14 aa, synthetic construct
GSLVSTQSGQNQQT

SEQ ID NO: 673 - protein, 14 aa, synthetic construct
GSGVSARMVQNQQT

SEQ ID NO: 674 - protein, 14 aa, synthetic construct
GSGQTRMPLANQQT

SEQ ID NO: 675 - protein, 14 aa, synthetic construct
GSGISSRNMQNQQT

SEQ ID NO: 676 - protein, 14 aa, synthetic construct
GSGEKVHSGQNQQT

SEQ ID NO: 677 - protein, 14 aa, synthetic construct
GSGQNQQKLSSMST

SEQ ID NO: 678 - protein, 14 aa, synthetic construct
GSGQNQQTGQHMRV

SEQ ID NO: 679 - protein, 14 aa, synthetic construct
GSGMIHTTAQNQQT

SEQ ID NO: 680 - protein, 14 aa, synthetic construct
GSGQNWPALKGQQT

SEQ ID NO: 681 - protein, 14 aa, synthetic construct
GASHMSISGQNQQT

SEQ ID NO: 682 - protein, 14 aa, synthetic construct
GSDQNQQLGYSKQT

SEQ ID NO: 683 - protein, 14 aa, synthetic construct
GIPSIRESGQNQQT

SEQ ID NO: 684 - protein, 14 aa, synthetic construct
GSGIPSVKFQNQQT

SEQ ID NO: 685 - protein, 14 aa, synthetic construct
GSGQNQQTSVSQNV

SEQ ID NO: 686 - protein, 14 aa, synthetic construct
GSGQNQQIGESRMT

SEQ ID NO: 687 - protein, 14 aa, synthetic construct
GSGSSSMSFQNQQT

SEQ ID NO: 688 - protein, 14 aa, synthetic construct
GSGQKQERAVSKQT

SEQ ID NO: 689 - protein, 14 aa, synthetic construct
GCTTRLNSGQNQQT

SEQ ID NO: 690 - protein, 14 aa, synthetic construct
GSGQNQQIISTKIT

SEQ ID NO: 691 - protein, 14 aa, synthetic construct
GSGQNQQKSLNGNT

SEQ ID NO: 692 - protein, 14 aa, synthetic construct
GSGIPAPRLQNQQT

SEQ ID NO: 693 - protein, 14 aa, synthetic construct
GSGQIRESMGNQQT

SEQ ID NO: 694 - protein, 14 aa, synthetic construct
GSGQNSGVHFNQQT

SEQ ID NO: 695 - protein, 14 aa, synthetic construct
GSGQNIGHSLPQQT

SEQ ID NO: 696 - protein, 14 aa, synthetic construct
GSGERSISVQNQQT

SEQ ID NO: 697 - protein, 14 aa, synthetic construct
GSGLKPNVLQNQQT

SEQ ID NO: 698 - protein, 14 aa, synthetic construct
GSGQVAYAQGNQQT

SEQ ID NO: 699 - protein, 14 aa, synthetic construct
GSGQSSYGSGNQQT

SEQ ID NO: 700 - protein, 14 aa, synthetic construct
GSGQNQAMTHGDQT

SEQ ID NO: 701 - protein, 14 aa, synthetic construct
GSGQNQALVSMGQT

SEQ ID NO: 702 - protein, 14 aa, synthetic construct
GSGQNPSFMRGQQT

SEQ ID NO: 703 - protein, 14 aa, synthetic construct
GSGQNQQSHLRTNT

SEQ ID NO: 704 - protein, 14 aa, synthetic construct
GYTRLETSGQNQQT

SEQ ID NO: 705 - protein, 14 aa, synthetic construct
GSGQSYDMRGNQQT

SEQ ID NO: 706 - protein, 14 aa, synthetic construct
GSRTTQDIGQNQQT

SEQ ID NO: 707 - protein, 14 aa, synthetic construct
GSGHPYKAAQNQQT

SEQ ID NO: 708 - protein, 14 aa, synthetic construct
GRLSNAHGGQNQQT

SEQ ID NO: 709 - protein, 14 aa, synthetic construct
GSGQNQRAVLNDQT

SEQ ID NO: 710 - protein, 14 aa, synthetic construct
GGSHTYGGGQNQQT

SEQ ID NO: 711 - protein, 14 aa, synthetic construct
GSSVNSMIGQNQQT

SEQ ID NO: 712 - protein, 14 aa, synthetic construct
GNSSMMGSGQNQQT

SEQ ID NO: 713 - protein, 14 aa, synthetic construct
GNRDRPSSGQNQQT

SEQ ID NO: 714 - protein, 14 aa, synthetic construct
GSGNMHASRQNQQT

SEQ ID NO: 715 - protein, 14 aa, synthetic construct
GFIFPKVSGQNQQT

SEQ ID NO: 716 - protein, 14 aa, synthetic construct
GSGQNQQLKNSTST

SEQ ID NO: 717 - protein, 14 aa, synthetic construct
GSGQNQQSQYMPRT

SEQ ID NO: 718 - protein, 14 aa, synthetic construct
GSGQRMADIGNQQT

SEQ ID NO: 719 - protein, 14 aa, synthetic construct
GSGQNQSHYPSQQT

SEQ ID NO: 720 - protein, 14 aa, synthetic construct
GSDGKMHRGQNQQT

SEQ ID NO: 721 - protein, 14 aa, synthetic construct
GSGSVGFIGQNQQT

SEQ ID NO: 722 - protein, 14 aa, synthetic construct
GLHGMTLSGQNQQT

SEQ ID NO: 723 - protein, 14 aa, synthetic construct
GSDQSKRGDSNQQT

SEQ ID NO: 724 - protein, 14 aa, synthetic construct
GSLFLATGGQNQQT

SEQ ID NO: 725 - protein, 14 aa, synthetic construct
GSGQNQQPSAFSKT

SEQ ID NO: 726 - protein, 14 aa, synthetic construct
GSGQLPQSGLNQQT

SEQ ID NO: 727 - protein, 14 aa, synthetic construct
GSGSKQNALQNQQT

SEQ ID NO: 728 - protein, 14 aa, synthetic construct
GSGQRRELSQNQQT

SEQ ID NO: 729 - protein, 14 aa, synthetic construct
GSGQREPKASNQQT

SEQ ID NO: 730 - protein, 14 aa, synthetic construct
GSGQNQQHPSTQQT

SEQ ID NO: 731 - protein, 14 aa, synthetic construct
GSQSTLGLGQNQQT

SEQ ID NO: 732 - protein, 14 aa, synthetic construct
GSGQNQQMPGLSST

SEQ ID NO: 733 - protein, 14 aa, synthetic construct
GSGQNQQTVGGKNL

SEQ ID NO: 734 - protein, 14 aa, synthetic construct
GSSREFHSGQNQQT

SEQ ID NO: 735 - protein, 14 aa, synthetic construct
GSGQNQQTVPSNLV

SEQ ID NO: 736 - protein, 14 aa, synthetic construct
GSGQNAYSSQAQQT

SEQ ID NO: 737 - protein, 14 aa, synthetic construct
GSGQNKDHSTRRQT

SEQ ID NO: 738 - protein, 14 aa, synthetic construct
GQLGSVGSGQDQQT

SEQ ID NO: 739 - protein, 14 aa, synthetic construct
GSGQHAAPGHNQQT

SEQ ID NO: 740 - protein, 14 aa, synthetic construct
GSGQNQQTSQSPPT

SEQ ID NO: 741 - protein, 14 aa, synthetic construct
GSGNYRDHEQNQQT

SEQ ID NO: 742 - protein, 14 aa, synthetic construct
GSGQHSNQHVNQQT

SEQ ID NO: 743 - protein, 14 aa, synthetic construct
GSGQTARNGINQQT

SEQ ID NO: 744 - protein, 14 aa, synthetic construct
GSGQNQQHYGSQGT

SEQ ID NO: 745 - protein, 14 aa, synthetic construct
GSGSPQASRQNQQT

SEQ ID NO: 746 - protein, 14 aa, synthetic construct
GSGFSHSMGKNQQT

SEQ ID NO: 747 - protein, 14 aa, synthetic construct
GSGQSHSLETNQQT

SEQ ID NO: 748 - protein, 14 aa, synthetic construct
GTEQTRQSGQNQQT

SEQ ID NO: 749 - protein, 14 aa, synthetic construct
GSGRHLASVQNQQT

SEQ ID NO: 750 - protein, 14 aa, synthetic construct
GLGSKNHSGQNQQT

SEQ ID NO: 751 - protein, 14 aa, synthetic construct
GSGQNQQTSHFPSA

SEQ ID NO: 752 - protein, 14 aa, synthetic construct
GSGQLSGTPQNQQT

SEQ ID NO: 753 - protein, 14 aa, synthetic construct
GSGQNQQAPHKKET

SEQ ID NO: 754 - protein, 14 aa, synthetic construct
GSGQNQQTLRGSLE

SEQ ID NO: 755 - protein, 14 aa, synthetic construct
GSIAMTSHGQNQQT

SEQ ID NO: 756 - protein, 14 aa, synthetic construct
GSPGVSPSGQNQQT

SEQ ID NO: 757 - protein, 14 aa, synthetic construct
GSGQNQQTGSSSRV

SEQ ID NO: 758 - protein, 14 aa, synthetic construct
GSGQHLPLLGNQQT

SEQ ID NO: 759 - protein, 14 aa, synthetic construct
GSDHSHRGGQNQQT

SEQ ID NO: 760 - protein, 14 aa, synthetic construct
GSGIVTKLGQNQQT

SEQ ID NO: 761 - protein, 14 aa, synthetic construct
GSGQDVTKTGNQQT

SEQ ID NO: 762 - protein, 14 aa, synthetic construct
GSGQNQQSHGRIGT

SEQ ID NO: 763 - protein, 14 aa, synthetic construct
GSGQNQQINHRSPT

SEQ ID NO: 764 - protein, 14 aa, synthetic construct
GSGDDSRVGQNQQT

SEQ ID NO: 765 - protein, 14 aa, synthetic construct
GSGQSTLKRINQQT

SEQ ID NO: 766 - protein, 14 aa, synthetic construct
GSGSQHSKAQNQQT

SEQ ID NO: 767 - protein, 14 aa, synthetic construct
GSGQNQQHASSNNT

SEQ ID NO: 768 - protein, 14 aa, synthetic construct
GSRTYQVSGQNQQT

SEQ ID NO: 769 - protein, 14 aa, synthetic construct
GSGQNQGLLSSPQT

SEQ ID NO: 770 - protein, 14 aa, synthetic construct
GSGGGLQHNQNQQT

SEQ ID NO: 771 - protein, 14 aa, synthetic construct
GSGQNQQTTAATRM

SEQ ID NO: 772 - protein, 14 aa, synthetic construct
GSGQNQRASILVQT

SEQ ID NO: 773 - protein, 14 aa, synthetic construct
GSGQNLGLLGAQQT

SEQ ID NO: 774 - protein, 14 aa, synthetic construct
GSLDLGRSGQNQQT

SEQ ID NO: 775 - protein, 14 aa, synthetic construct
GNSQVKVSGQNQQT

SEQ ID NO: 776 - protein, 14 aa, synthetic construct
GSSGSHQYGQNQQT

SEQ ID NO: 777 - protein, 14 aa, synthetic construct
GSGQNQQQRDGTLT

SEQ ID NO: 778 - protein, 14 aa, synthetic construct
GRGQHVSVANNQQT

SEQ ID NO: 779 - protein, 14 aa, synthetic construct
GDSSSRISGQNQQT

SEQ ID NO: 780 - protein, 14 aa, synthetic construct
GSGQNQQHSLSSQT

SEQ ID NO: 781 - protein, 14 aa, synthetic construct
GSLMDVHRGQNQQT

SEQ ID NO: 782 - protein, 14 aa, synthetic construct
GSIQYQSSGQNQQT

SEQ ID NO: 783 - protein, 14 aa, synthetic construct
GLGSKNPSGQNQQT

SEQ ID NO: 784 - protein, 14 aa, synthetic construct
GSGQLVLTLQNQQT

SEQ ID NO: 785 - protein, 14 aa, synthetic construct
GSGQNQQTSQPLPG

SEQ ID NO: 786 - protein, 14 aa, synthetic construct
GSGQNQQNLGKLNT

SEQ ID NO: 787 - protein, 14 aa, synthetic construct
GTTAHQPSGQNQQT

SEQ ID NO: 788 - protein, 14 aa, synthetic construct
GSGQNRAQIGTQQT

SEQ ID NO: 789 - protein, 14 aa, synthetic construct
GSGQYVHVSSNQQT

SEQ ID NO: 790 - protein, 14 aa, synthetic construct
GSGQNQQTAHAFNI

SEQ ID NO: 791 - protein, 14 aa, synthetic construct
GSGQNQRTMVATQT

SEQ ID NO: 792 - protein, 14 aa, synthetic construct
GSGQNPIRGAMQQT

SEQ ID NO: 793 - protein, 14 aa, synthetic construct
GSGYVITGSQNQQT

SEQ ID NO: 794 - protein, 14 aa, synthetic construct
GRGPKQSNIQNQQT

SEQ ID NO: 795 - protein, 14 aa, synthetic construct
GSGQNQQTMLGKPC

SEQ ID NO: 796 - protein, 14 aa, synthetic construct
GSGQNQQVGSTVRT

SEQ ID NO: 797 - protein, 14 aa, synthetic construct
GNVTTQKSGQNQQT

SEQ ID NO: 798 - protein, 14 aa, synthetic construct
GSGNPVSHLQNQQT

SEQ ID NO: 799 - protein, 14 aa, synthetic construct
GSLSHMESGQNQQT

SEQ ID NO: 800 - protein, 14 aa, synthetic construct
GRAPTNLSGQNQQT

SEQ ID NO: 801 - protein, 14 aa, synthetic construct
GSGQNQQTVMTARA

SEQ ID NO: 802 - protein, 14 aa, synthetic construct
GSGMPASRLQNQQT

SEQ ID NO: 803 - protein, 14 aa, synthetic construct
GVVRNHQSGQNQQT

SEQ ID NO: 804 - protein, 14 aa, synthetic construct
GSGQNQHSVQVRQT

SEQ ID NO: 805 - protein, 14 aa, synthetic construct
GSGQNTGHLTMQQT

SEQ ID NO: 806 - protein, 14 aa, synthetic construct
GSGQNQQYAGKILT

SEQ ID NO: 807 - protein, 14 aa, synthetic construct
GSGNPHVRNQNQQT

SEQ ID NO: 808 - protein, 14 aa, synthetic construct
GSGQNGGSSNRQQT

SEQ ID NO: 809 - protein, 14 aa, synthetic construct
GSGQRLSQGVNHQT

SEQ ID NO: 810 - protein, 14 aa, synthetic construct
GSGQNAHAKEGQQT

SEQ ID NO: 811 - protein, 14 aa, synthetic construct
GSSPAPNSGQNQQT

SEQ ID NO: 812 - protein, 14 aa, synthetic construct
GLAHKTSSGQNQQT

SEQ ID NO: 813 - protein, 14 aa, synthetic construct
GSGQNQQTPGAHKT

SEQ ID NO: 814 - protein, 14 aa, synthetic construct
GSGQNQQSLSGSFT

SEQ ID NO: 815 - protein, 14 aa, synthetic construct
GSGQNQQSTGTSRT

SEQ ID NO: 816 - protein, 14 aa, synthetic construct
GSGQNQQTVQSNLV

SEQ ID NO: 817 - protein, 14 aa, synthetic construct
GSGQNQQLGSRQCT

SEQ ID NO: 818 - protein, 14 aa, synthetic construct
GSGQNQYLRLELQT

SEQ ID NO: 819 - protein, 14 aa, synthetic construct
GSGQNQQTSPRLQT

SEQ ID NO: 820 - protein, 14 aa, synthetic construct
GSGQNQQTTSSNMT

SEQ ID NO: 821 - protein, 14 aa, synthetic construct
GTASTYNSGQNQQT

SEQ ID NO: 822 - protein, 14 aa, synthetic construct
GSGQNQQTMPQHKI

SEQ ID NO: 823 - protein, 14 aa, synthetic construct
GSGQSHLHTGNQQT

SEQ ID NO: 824 - protein, 14 aa, synthetic construct
GVKGVGHSGQNQQT

SEQ ID NO: 825 - protein, 14 aa, synthetic construct
GSGKVTKQSQNQQT

SEQ ID NO: 826 - protein, 14 aa, synthetic construct
GSGQNQQTALEKSL

SEQ ID NO: 827 - protein, 14 aa, synthetic construct
GSGYKDTYGQNQQT

SEQ ID NO: 828 - protein, 14 aa, synthetic construct
GSGQNQQSGTFLST

SEQ ID NO: 829 - protein, 14 aa, synthetic construct
GSGQNTGQHMMQQT

SEQ ID NO: 830 - protein, 14 aa, synthetic construct
GSGKNQQRPGLDQT

SEQ ID NO: 831 - protein, 14 aa, synthetic construct
GSGQSREISLNQQT

SEQ ID NO: 832 - protein, 14 aa, synthetic construct
GTPTSPSSGQNQQT

SEQ ID NO: 833 - protein, 14 aa, synthetic construct
GKPAGGLSGQNQQT

SEQ ID NO: 834 - protein, 14 aa, synthetic construct
GSGQNHRSADMQQT

SEQ ID NO: 835 - protein, 14 aa, synthetic construct
GSGQNQQTLPSLSL

SEQ ID NO: 836 - protein, 14 aa, synthetic construct
GSPYMGATGQNQQT

SEQ ID NO: 837 - protein, 14 aa, synthetic construct
GSGHAKAVGQNQQT

SEQ ID NO: 838 - protein, 14 aa, synthetic construct
GHMKGVTSGQNQQT

SEQ ID NO: 839 - protein, 14 aa, synthetic construct
GSGQNQKILTLDQT

SEQ ID NO: 840 - protein, 14 aa, synthetic construct
GSGQNQQTKVGHSA

SEQ ID NO: 841 - protein, 14 aa, synthetic construct
GIARTTISGQNQQT

SEQ ID NO: 842 - protein, 14 aa, synthetic construct
GSGQNQQTSVGFRT

SEQ ID NO: 843 - protein, 14 aa, synthetic construct
GSGQNQQTMIANIR

SEQ ID NO: 844 - protein, 14 aa, synthetic construct
GDMTRSSSGQNQQT

SEQ ID NO: 845 - protein, 14 aa, synthetic construct
GSGHMSDLRQNQQT

SEQ ID NO: 846 - protein, 14 aa, synthetic construct
GRGAVMASGQNQQT

SEQ ID NO: 847 - protein, 14 aa, synthetic construct
GSGQNQQLSGKSVT

SEQ ID NO: 848 - protein, 14 aa, synthetic construct
GSHTLVVSGQNQQT

SEQ ID NO: 849 - protein, 14 aa, synthetic construct
GSGPWSAGLQNQQT

SEQ ID NO: 850 - protein, 14 aa, synthetic construct
GSGQHSPHALNQQT

SEQ ID NO: 851 - protein, 14 aa, synthetic construct
GSGQNQQPNSGSMT

SEQ ID NO: 852 - protein, 14 aa, synthetic construct
GSGLAHLGGQNQQT

SEQ ID NO: 853 - protein, 14 aa, synthetic construct
GSSVRYEPKQNQQT

SEQ ID NO: 854 - protein, 14 aa, synthetic construct
GSGQNQQARPLELT

SEQ ID NO: 855 - protein, 14 aa, synthetic construct
GSGQPRSTGINQQT

SEQ ID NO: 856 - protein, 14 aa, synthetic construct
GSGQNQANWVKVQT

SEQ ID NO: 857 - protein, 14 aa, synthetic construct
GSGHLFQSGQNQQT

SEQ ID NO: 858 - protein, 14 aa, synthetic construct
GSGQNRGISISQQT

SEQ ID NO: 859 - protein, 14 aa, synthetic construct
GSGTHYDNRQNQQT

SEQ ID NO: 860 - protein, 14 aa, synthetic construct
GSGQNQQTSTTPLP

SEQ ID NO: 861 - protein, 14 aa, synthetic construct
GSGQVHASQVNQKT

SEQ ID NO: 862 - protein, 14 aa, synthetic construct
GSSGHRESGQNQQT

SEQ ID NO: 863 - protein, 14 aa, synthetic construct
GLSAEKSSGQNQQT

SEQ ID NO: 864 - protein, 14 aa, synthetic construct
GSGQEHRSLANQQT

SEQ ID NO: 865 - protein, 14 aa, synthetic construct
GSGQTVVRIANQQT

SEQ ID NO: 866 - protein, 14 aa, synthetic construct
GSGQNVSSVHRQQT

SEQ ID NO: 867 - protein, 14 aa, synthetic construct
GSGASRMSIQNQQT

SEQ ID NO: 868 - protein, 14 aa, synthetic construct
GVAFIGSSGQNQQT

SEQ ID NO: 869 - protein, 14 aa, synthetic construct
GSGQNQQTVPTRQT

SEQ ID NO: 870 - protein, 14 aa, synthetic construct
GSGQAAKSSQNQQT

SEQ ID NO: 871 - protein, 14 aa, synthetic construct
GSGQNQQVAIRTST

SEQ ID NO: 872 - protein, 14 aa, synthetic construct
GSVHMQNAGQNQQT

SEQ ID NO: 873 - protein, 14 aa, synthetic construct
GSGMRQAGVQNQQT

SEQ ID NO: 874 - protein, 14 aa, synthetic construct
GSGQNQQVGGKTVT

SEQ ID NO: 875 - protein, 14 aa, synthetic construct
GVHDMRVSGQNQQT

SEQ ID NO: 876 - protein, 14 aa, synthetic construct
GSGQHVSVANNQQT

SEQ ID NO: 877 - protein, 14 aa, synthetic construct
GSAAMSVRGQNQQT

SEQ ID NO: 878 - protein, 14 aa, synthetic construct
GVSRGGPSGQNQQT

SEQ ID NO: 879 - protein, 14 aa, synthetic construct
GSGQMVHTIGNQQT

SEQ ID NO: 880 - protein, 14 aa, synthetic construct
GRGGSMAETQNQQT

SEQ ID NO: 881 - protein, 14 aa, synthetic construct
GSGHTNPTRQNQQT

SEQ ID NO: 882 - protein, 14 aa, synthetic construct
GSGEAARYEQNQQT

SEQ ID NO: 883 - protein, 14 aa, synthetic construct
GSGQNERHLVLQQT

SEQ ID NO: 884 - protein, 14 aa, synthetic construct
GSGQNQQSKQQVLT

SEQ ID NO: 885 - protein, 14 aa, synthetic construct
GSGQARAHRGNQQT

SEQ ID NO: 886 - protein, 14 aa, synthetic construct
GSGQNQQPLDTSRT

SEQ ID NO: 887 - protein, 14 aa, synthetic construct
GSGQNQQLANMVTT

SEQ ID NO: 888 - protein, 14 aa, synthetic construct
GSGQMKDLHRNQQT

SEQ ID NO: 889 - protein, 14 aa, synthetic construct
GSGQNQHLSSFVQT

SEQ ID NO: 890 - protein, 14 aa, synthetic construct
GSGQNQQPSSRVTT

SEQ ID NO: 891 - protein, 14 aa, synthetic construct
GSGQNQQLAITLGT

SEQ ID NO: 892 - protein, 14 aa, synthetic construct
GSGQNQQTVGNPAT

SEQ ID NO: 893 - protein, 14 aa, synthetic construct
GSGQNQGRAHPMQT

SEQ ID NO: 894 - protein, 14 aa, synthetic construct
GSGQLIASVVNQQT

SEQ ID NO: 895 - protein, 14 aa, synthetic construct
GSSVRSLVGQNQQT

SEQ ID NO: 896 - protein, 14 aa, synthetic construct
GGAGSAHSGQNQQT

SEQ ID NO: 897 - protein, 14 aa, synthetic construct
GSDQNQQTMSSTRT

SEQ ID NO: 898 - protein, 14 aa, synthetic construct
GSGQNQQMAGAFRT

SEQ ID NO: 899 - protein, 14 aa, synthetic construct
GSLGNLQRGQNQQT

SEQ ID NO: 900 - protein, 14 aa, synthetic construct
GSGPSISHGQNQQT

SEQ ID NO: 901 - protein, 14 aa, synthetic construct
GSGQNQQSSFNVQT

SEQ ID NO: 902 - protein, 14 aa, synthetic construct
GSGQNQQTGQATHN

SEQ ID NO: 903 - protein, 14 aa, synthetic construct
VSGSPHSKAQNQQT

SEQ ID NO: 904 - protein, 14 aa, synthetic construct
CSGSPHSKAQNQQT

SEQ ID NO: 905 - protein, 14 aa, synthetic construct
GSGSPHRKAQNQQT

SEQ ID NO: 906 - protein, 14 aa, synthetic construct
GRGSPHSKAQNQQT

SEQ ID NO: 907 - protein, 14 aa, synthetic construct
GSGSPHSKAQNKQT

SEQ ID NO: 908 - protein, 14 aa, synthetic construct
GSGSPHSKAQTQQT

SEQ ID NO: 909 - protein, 14 aa, synthetic construct
GSGSTHASRQNQQT

SEQ ID NO: 910 - protein, 14 aa, synthetic construct
GSGSPHKYGQNQQT

SEQ ID NO: 911 - protein, 14 aa, synthetic construct
GSGSPHKFGQNQQT

SEQ ID NO: 912 - protein, 14 aa, synthetic construct
VSGSPHKFGQNQQT

SEQ ID NO: 913 - protein, 14 aa, synthetic construct
GSGSPHSKAQNHQT

SEQ ID NO: 914 - protein, 14 aa, synthetic construct
GSGSPHSKAQHQQT

SEQ ID NO: 915 - protein, 14 aa, synthetic construct
GSGSPHKTYQNQQT

SEQ ID NO: 916 - protein, 14 aa, synthetic construct
VSGSPHASRQNQQT

SEQ ID NO: 917 - protein, 14 aa, synthetic construct
GSGSPHKFGKNQQT

SEQ ID NO: 918 - protein, 14 aa, synthetic construct
GSGSPHASRQNQHT

SEQ ID NO: 919 - protein, 14 aa, synthetic construct
GSHSPHKSGQNQQT

SEQ ID NO: 920 - protein, 14 aa, synthetic construct
GSGQNQQRRMSPST

SEQ ID NO: 921 - protein, 14 aa, synthetic construct
GSGSPHSKPQNQQT

SEQ ID NO: 922 - protein, 14 aa, synthetic construct
GSGSPHKFGQKQQT

SEQ ID NO: 923 - protein, 14 aa, synthetic construct
VSGSPHGARQNQQT

SEQ ID NO: 924 - protein, 14 aa, synthetic construct
GSGSPHSKAQKQQT

SEQ ID NO: 925 - protein, 14 aa, synthetic construct
GSHSPHKRGQNQQT

SEQ ID NO: 926 - protein, 14 aa, synthetic construct
GSGQNRQRLKGLET

SEQ ID NO: 927 - protein, 14 aa, synthetic construct
GSGSPHKLGQNQQT

SEQ ID NO: 928 - protein, 14 aa, synthetic construct
GSGSPHKTSKNQQT

SEQ ID NO: 929 - protein, 14 aa, synthetic construct
GSGSPHKIGQNQQT

SEQ ID NO: 930 - protein, 14 aa, synthetic construct
GSGQDSPHVRNQQT

SEQ ID NO: 931 - protein, 14 aa, synthetic construct
GSGSPHKTSQNQQT

SEQ ID NO: 932 - protein, 14 aa, synthetic construct
GSGSPHASRKNQQT

SEQ ID NO: 933 - protein, 14 aa, synthetic construct
GSHSPHKSGQKQQT

SEQ ID NO: 934 - protein, 14 aa, synthetic construct
GSGSPHKTSQKQQT

SEQ ID NO: 935 - protein, 14 aa, synthetic construct
GSGSPHVRGQNKQT

SEQ ID NO: 936 - protein, 14 aa, synthetic construct
GSGSPHKTTQNQQT

SEQ ID NO: 937 - protein, 14 aa, synthetic construct
GSGPVRALRQNQQT

SEQ ID NO: 938 - protein, 14 aa, synthetic construct
GSGSPHVRGQKQQT

SEQ ID NO: 939 - protein, 14 aa, synthetic construct
CSGSPHKTSQNQQT

SEQ ID NO: 940 - protein, 14 aa, synthetic construct
CSHSPHKSGQNQQT

SEQ ID NO: 941 - protein, 6 aa, synthetic construct
SPHSKA

SEQ ID NO: 942 - DNA, 18 bp, synthetic construct
  source 1..18: mol_type = other DNA
agcccacacagcaaagca

SEQ ID NO: 943 - protein, 8 aa, synthetic construct
HDSPHKSG

SEQ ID NO: 944 - DNA, 24 bp, synthetic construct
  source 1..24: mol_type = other DNA
cacgacagcccacacaaaagcgga

SEQ ID NO: 945 - protein, 6 aa, synthetic construct
SPHSKA

SEQ ID NO: 946 - protein, 6 aa, synthetic construct
SPHKSG

SEQ ID NO: 947 - protein, 6 aa, synthetic construct
SPHARM

SEQ ID NO: 948 - protein, 6 aa, synthetic construct
SPHVKS

SEQ ID NO: 949 - protein, 6 aa, synthetic construct
SPHASR

SEQ ID NO: 950 - protein, 6 aa, synthetic construct
SPHVKI

SEQ ID NO: 951 - protein, 6 aa, synthetic construct
SPHKSR

SEQ ID NO: 952 - protein, 6 aa, synthetic construct
SPHSLR

SEQ ID NO: 953 - protein, 6 aa, synthetic construct
SPHSKW

SEQ ID NO: 954 - protein, 6 aa, synthetic construct
SPHKKN

SEQ ID NO: 955 - protein, 6 aa, synthetic construct
SPHVRM

SEQ ID NO: 956 - protein, 6 aa, synthetic construct
SPHRKA

SEQ ID NO: 957 - protein, 6 aa, synthetic construct
SPHKFG

SEQ ID NO: 958 - protein, 6 aa, synthetic construct
SPHKIG

SEQ ID NO: 959 - protein, 6 aa, synthetic construct
SPHKLG

SEQ ID NO: 960 - protein, 6 aa, synthetic construct
SPHSKL

SEQ ID NO: 961 - protein, 6 aa, synthetic construct
SPHSRG

SEQ ID NO: 962 - protein, 6 aa, synthetic construct
SPHSKS

SEQ ID NO: 963 - protein, 6 aa, synthetic construct
SPHKTS

SEQ ID NO: 964 - protein, 6 aa, synthetic construct
SPHKTT

SEQ ID NO: 965 - protein, 6 aa, synthetic construct
SPHKTY

SEQ ID NO: 966 - protein, 6 aa, synthetic construct
SPHKYG

SEQ ID NO: 967 - protein, 6 aa, synthetic construct
SPHSKD

SEQ ID NO: 968 - protein, 6 aa, synthetic construct
SPHSKP

SEQ ID NO: 969 - protein, 6 aa, synthetic construct
SPHSRA

SEQ ID NO: 970 - protein, 6 aa, synthetic construct
SPHSSR

SEQ ID NO: 971 - protein, 6 aa, synthetic construct
SPHWKA

SEQ ID NO: 972 - protein, 6 aa, synthetic construct
SPHTRG

SEQ ID NO: 973 - protein, 6 aa, synthetic construct
SPHVRG

SEQ ID NO: 974 - protein, 6 aa, synthetic construct
SPHKRG

SEQ ID NO: 975 - protein, 6 aa, synthetic construct
SPHGAR

SEQ ID NO: 976 - protein, 6 aa, synthetic construct
SPHRSG

SEQ ID NO: 977 - protein, 6 aa, synthetic construct
SPHKSA

SEQ ID NO: 978 - protein, 6 aa, synthetic construct
SPHSKR

SEQ ID NO: 979 - protein, 6 aa, synthetic construct
SPHFLR

SEQ ID NO: 980 - protein, 6 aa, synthetic construct
SPHVRR

SEQ ID NO: 981 - protein, 742 aa, synthetic construct
MAADGYLPDWLEDNLSEGIREWWALKPGAPQPKANQQHQDNARGLVLPGYKYLGPGNGLDKGEPVNAADAAALEHDKAYDQQLKAGDNPYLKYNHADAEFQERLKEDTSFGGNLGRAVFQAKKRLLEPLGLVEEAAKTAPGKKRPVEQSPQEPDSSAGIGKSGAQPAKKRLNFGQTGDTESVPDPQPIGEPPAAPSGVGSLTMASGGGAPVADNNEGADGVGSSSGNWHCDSQWLGDRVITTSTRTWALPTYNNHLYKQISNSTSGGSSNDNAYFGYSTPWGYFDFNRFHCHFSPRDWQRLINNNWGFRPKRLNFKLFNIQVKEVTDNNGVKTIANNLTSTVQVFTDSDYQLPYVLGSAHEGCLPPFPADVFMIPQYGYLTLNDGSQAVGRSSFYCLEYFPSQMLRTGNNFQFSYEFENVPFHSSYAHSQSLDRLMNPLIDQYLYYLSKTINGSGSPHSKAQNQQTLKFSVAGPSNMAVQGRNYIPGPSYRQQRVSTTVTQNNNSEFAWPGASSWALNGRNSLMNPGPAMASHKEGEDRFFPLSGSLIFGKQGTGRDNVDADKVMITNEEEIKTTNPVATESYGQVATNHQSAQAQAQTGWVQNQGILPGMVWQDRDVYLQGPIWAKIPHTDGNFHPSPLMGGFGMKHPPPQILIKNTPVPADPPTAFNKDKLNSFITQYSTGQVSVEIEWELQKENSKRWNPEIQYTSNYYKSNNVEFAVNTEGVYSEPRPIGTRYLTRNL

SEQ ID NO: 982 - protein, 742 aa, synthetic construct
MAADGYLPDWLEDNLSEGIREWWALKPGAPQPKANQQHQDNARGLVLPGYKYLGPGNGLDKGEPVNAADAAALEHDKAYDQQLKAGDNPYLKYNHADAEFQERLKEDTSFGGNLGRAVFQAKKRLLEPLGLVEEAAKTAPGKKRPVEQSPQEPDSSAGIGKSGAQPAKKRLNFGQTGDTESVPDPQPIGEPPAAPSGVGSLTMASGGGAPVADNNEGADGVGSSSGNWHCDSQWLGDRVITTSTRTWALPTYNNHLYKQISNSTSGGSSNDNAYFGYSTPWGYFDFNRFHCHFSPRDWQRLINNNWGFRPKRLNFKLFNIQVKEVTDNNGVKTIANNLTSTVQVFTDSDYQLPYVLGSAHEGCLPPFPADVFMIPQYGYLTLNDGSQAVGRSSFYCLEYFPSQMLRTGNNFQFSYEFENVPFHSSYAHSQSLDRLMNPLIDQYLYYLSKTINGHDSPHKSGQNQQTLKFSVAGPSNMAVQGRNYIPGPSYRQQRVSTTVTQNNNSEFAWPGASSWALNGRNSLMNPGPAMASHKEGEDRFFPLSGSLIFGKQGTGRDNVDADKVMITNEEEIKTTNPVATESYGQVATNHQSAQAQAQTGWVQNQGILPGMVWQDRDVYLQGPIWAKIPHTDGNFHPSPLMGGFGMKHPPPQILIKNTPVPADPPTAFNKDKLNSFITQYSTGQVSVEIEWELQKENSKRWNPEIQYTSNYYKSNNVEFAVNTEGVYSEPRPIGTRYLTRNL

SEQ ID NO: 983 - DNA, 2229 bp, synthetic construct
  source 1..2229: mol_type = other DNA
atggctgccgatggttatcttccagattggctcgaggacaaccttagtgaaggaattcgcgagtggtgggctttgaaacctggagcccctcaacccaaggcaaatcaacaacatcaagacaacgctcgaggtcttgtgcttccgggttacaaataccttggacccggcaacggactcgacaagggggagccggtcaacgcagcagacgcggcggccctcgagcacgacaaggcctacgaccagcagctcaaggccggagacaacccgtacctcaagtacaaccacgccgacgccgagttccaggagcggctcaaagaagatacgtcttttgggggcaacctcgggcgagcagtcttccaggccaaaaagaggcttcttgaacctcttggtctggttgaggaagcggctaagacggctcctggaaagaagaggcctgtagagcagtctcctcaggaaccggactcctccgcgggtattggcaaatcgggtgcacagcccgctaaaaagagactcaatttcggtcagactggcgacacagagtcagtcccagaccctcaaccaatcggagaacctcccgcagccccctcaggtgtgggatctcttacaatggcttcaggtggtggcgcaccagtggcagacaataacgaaggtgccgatggagtgggtagttcctcgggaaattggcattgcgattcccaatggctgggggacagagtcatcaccaccagcacccgaacctgggccctgcccacctacaacaatcacctctacaagcaaatctccaacagcacatctggaggatcttcaaatgacaacgcctacttcggctacagcaccccctgggggtattttgacttcaacagattccactgccacttctcaccacgtgactggcagcgactcatcaacaacaactggggattccggcctaagcgactcaacttcaagctcttcaacattcaggtcaaagaggttacggacaacaatggagtcaagaccatcgccaataaccttaccagcacggtccaggtcttcacggactcagactatcagctcccgtacgtgctcgggtcggctcacgagggctgcctcccgccgttcccagcggacgttttcatgattcctcagtacgggtatctgacgcttaatgatggaagccaggccgtgggtcgttcgtccttttactgcctggaatatttcccgtcgcaaatgctaagaacgggtaacaacttccagttcagctacgagtttgagaacgtacctttccatagcagctacgctcacagccaaagcctggaccgactaatgaatccactcatcgaccaatacttgtattacttgagtaaaacaattaacggaagcggaagcccacacagcaaagcacaaaaccaacagaccttgaagttttcggtagctggtcctagcaacatggctgtccagggaagaaactacatacctggacccagctaccgacaacaacgtgtctcaaccactgtgactcaaaacaacaacagcgaatttgcttggcctggagcttcttcttgggctctcaatggacgtaatagcttgatgaatcctggacctgctatggccagccacaaagaaggagaggaccgtttctttcctttgtctggatctttaatttttggcaaacaaggaactggaagagacaacgtggatgcggacaaagtcatgataaccaacgaagaagaaattaaaactactaacccggtagcaacggagtcctatggacaagtggccacaaaccaccagagtgcccaagcacaggcgcagaccggctgggttcaaaaccaaggaatacttccgggtatggtttggcaggacagagatgtgtacctgcaaggacccatttgggccaaaattcctcacacggacggcaactttcacccttctccgctgatgggagggtttggaatgaagcacccgcctcctcagatcctcatcaaaaacacacctgtacctgcggatcctccaacggccttcaacaaggacaagctgaactctttcatcacccagtattctactggccaagtcagcgtggagatcgagtgggagctgcagaaggaaaacagcaagcgctggaacccggagatccagtacacttccaactattacaagtctaataatgttgaatttgctgttaatactgaaggtgtatatagtgaaccccgccccattggcacgcggtatttaacgaggaacttataa

SEQ ID NO: 984 - DNA, 2229 bp, synthetic construct
  source 1..2229: mol_type = other DNA
atggctgccgatggttatcttccagattggctcgaggacaaccttagtgaaggaattcgcgagtggtgggctttgaaacctggagcccctcaacccaaggcaaatcaacaacatcaagacaacgctcgaggtcttgtgcttccgggttacaaataccttggacccggcaacggactcgacaagggggagccggtcaacgcagcagacgcggcggccctcgagcacgacaaggcctacgaccagcagctcaaggccggagacaacccgtacctcaagtacaaccacgccgacgccgagttccaggagcggctcaaagaagatacgtcttttgggggcaacctcgggcgagcagtcttccaggccaaaaagaggcttcttgaacctcttggtctggttgaggaagcggctaagacggctcctggaaagaagaggcctgtagagcagtctcctcaggaaccggactcctccgcgggtattggcaaatcgggtgcacagcccgctaaaaagagactcaatttcggtcagactggcgacacagagtcagtcccagaccctcaaccaatcggagaacctcccgcagccccctcaggtgtgggatctcttacaatggcttcaggtggtggcgcaccagtggcagacaataacgaaggtgccgatggagtgggtagttcctcgggaaattggcattgcgattcccaatggctgggggacagagtcatcaccaccagcacccgaacctgggccctgcccacctacaacaatcacctctacaagcaaatctccaacagcacatctggaggatcttcaaatgacaacgcctacttcggctacagcaccccctgggggtattttgacttcaacagattccactgccacttctcaccacgtgactggcagcgactcatcaacaacaactggggattccggcctaagcgactcaacttcaagctcttcaacattcaggtcaaagaggttacggacaacaatggagtcaagaccatcgccaataaccttaccagcacggtccaggtcttcacggactcagactatcagctcccgtacgtgctcgggtcggctcacgagggctgcctcccgccgttcccagcggacgttttcatgattcctcagtacgggtatctgacgcttaatgatggaagccaggccgtgggtcgttcgtccttttactgcctggaatatttcccgtcgcaaatgctaagaacgggtaacaacttccagttcagctacgagtttgagaacgtacctttccatagcagctacgctcacagccaaagcctggaccgactaatgaatccactcatcgaccaatacttgtattacttgagtaaaacaattaacggacacgacagcccacacaaaagcggacaaaaccaacagaccttgaagttttcggtagctggtcctagcaacatggctgtccagggaagaaactacatacctggacccagctaccgacaacaacgtgtctcaaccactgtgactcaaaacaacaacagcgaatttgcttggcctggagcttcttcttgggctctcaatggacgtaatagcttgatgaatcctggacctgctatggccagccacaaagaaggagaggaccgtttctttcctttgtctggatctttaatttttggcaaacaaggaactggaagagacaacgtggatgcggacaaagtcatgataaccaacgaagaagaaattaaaactactaacccggtagcaacggagtcctatggacaagtggccacaaaccaccagagtgcccaagcacaggcgcagaccggctgggttcaaaaccaaggaatacttccgggtatggtttggcaggacagagatgtgtacctgcaaggacccatttgggccaaaattcctcacacggacggcaactttcacccttctccgctgatgggagggtttggaatgaagcacccgcctcctcagatcctcatcaaaaacacacctgtacctgcggatcctccaacggccttcaacaaggacaagctgaactctttcatcacccagtattctactggccaagtcagcgtggagatcgagtgggagctgcagaaggaaaacagcaagcgctggaacccggagatccagtacacttccaactattacaagtctaataatgttgaatttgctgttaatactgaaggtgtatatagtgaaccccgccccattggcacgcggtatttaacgaggaacttataa

SEQ ID NO: 985 - protein, 6 aa, synthetic construct
STHASR

SEQ ID NO: 986 - protein, 6 aa, synthetic construct
SQHKSG

SEQ ID NO: 987 - DNA, 1184 bp, synthetic construct
  source 1..1184: mol_type = other DNA
cgtgaggctccggtgcccgtcagtgggcagagcgcacatcgcccacagtccccgagaagttggggggaggggtcggcaattgaaccggtgcctagagaaggtggcgcggggtaaactgggaaagtgatgtcgtgtactggctccgcctttttcccgagggtgggggagaaccgtatataagtgcagtagtcgccgtgaacgttctttttcgcaacgggtttgccgccagaacacaggtaagtgccgtgtgtggttcccgcgggcctggcctctttacgggttatggcccttgcgtgccttgaattacttccacctggctgcagtacgtgattcttgatcccgagcttcgggttggaagtgggtgggagagttcgaggccttgcgcttaaggagccccttcgcctcgtgcttgagttgaggcctggcctgggcgctggggccgccgcgtgcgaatctggtggcaccttcgcgcctgtctcgctgctttcgataagtctctagccatttaaaatttttgatgacctgctgcgacgctttttttctggcaagatagtcttgtaaatgcgggccaagatctgcacactggtatttcggtttttggggccgcgggcggcgacggggcccgtgcgtcccagcgcacatgttcggcgaggcggggcctgcgagcgcggccaccgagaatcggacgggggtagtctcaagctggccggcctgctctggtgcctggcctcgcgccgccgtgtatcgccccgccctgggcggcaaggctggcccggtcggcaccagttgcgtgagcggaaagatggccgcttcccggccctgctgcagggagctcaaaatggaggacgcggcgctcgggagagcgggcgggtgagtcacccacacaaaggaaaagggcctttccgtcctcagccgtcgcttcatgtgactccacggagtaccgggcgccgtccaggcacctcgattagttctcgagcttttggagtacgtcgtctttaggttggggggaggggttttatgcgatggagtttccccacactgagtgggtggagactgaagttaggccagcttggcacttgatgtaattctccttggaatttgccctttttgagtttggatcttggttcattctcaagcctcagacagtggttcaaagtttttttcttccatttcaggtgtcgtga

SEQ ID NO: 988 - DNA, 227 bp, synthetic construct
  source 1..227: mol_type = other DNA
gcccgtcagtgggcagagcgcacatcgcccacagtccccgagaagttggggggaggggtcggcaattgaaccggtgcctagagaaggtggcgcggggtaaactgggaaagtgatgtcgtgtactggctccgcctttttcccgagggtgggggagaaccgtatataagtgcagtagtcgccgtgaacgttctttttcgcaacgggtttgccgccagaacacgcgtaag

SEQ ID NO: 989 - skipped

SEQ ID NO: 990 - DNA, 16 bp, synthetic construct
  source 1..16: mol_type = other DNA
ggtggagaagagcatg

SEQ ID NO: 991 - DNA, 27 bp, synthetic construct
  source 1..27: mol_type = other DNA
gtcatcactgaggtggagaagagcatg

SEQ ID NO: 992-994 - skipped (3 entries)

SEQ ID NO: 995 - DNA, 222 bp, synthetic construct
  source 1..222: mol_type = other DNA
gcccgtcagtgggcagagcgcacatcgcccacagtccccgagaagttggggggaggggtcggcaattgaaccggtgcctagagaaggtggcgcggggtaaactgggaaagtgatgtcgtgtactggctccgcctttttcccgagggtgggggagaaccgtatataagtgcagtagtcgccgtgaacgttctttttcgcaacgggtttgccgccagaacacag

SEQ ID NO: 996 - DNA, 222 bp, synthetic construct
  source 1..222: mol_type = other DNA
gcccgtcagtgggcagagcgcacatcgcccacagtccccgagaagttggggggaggggtcggcaattgaaccggtgcctagagaaggtggcgcggggtaaactgggaaagtgatgtcgtgtactggctccgcctttttcccgagggtgggggagaaccgtatataagtgcagtagtcgccgtgaacgttctttttcgcaacgggtttgccgccagaacacgc

SEQ ID NO: 997 - skipped

SEQ ID NO: 998 - DNA, 229 bp, synthetic construct
  source 1..229: mol_type = other DNA
gtgcccgtcagtgggcagagcgcacatcgcccacagtccccgagaagttggggggaggggtcggcaattgaaccggtgcctagagaaggtggcgcggggtaaactgggaaagtgatgtcgtgtactggctccgcctttttcccgagggtgggggagaaccgtatataagtgcagtagtcgccgtgaacgttctttttcgcaacgggtttgccgccagaacacgcgtaag

SEQ ID NO: 999 - DNA, 235 bp, synthetic construct
  source 1..235: mol_type = other DNA
gctccggtgcccgtcagtgggcagagcgcacatcgcccacagtccccgagaagttggggggaggggtcggcaattgaaccggtgcctagagaaggtggcgcggggtaaactgggaaagtgatgtcgtgtactggctccgcctttttcccgagggtgggggagaaccgtatataagtgcagtagtcgccgtgaacgttctttttcgcaacgggtttgccgccagaacacgcgtaag

SEQ ID NO: 1000 - DNA, 241 bp, synthetic construct
  source 1..241: mol_type = other DNA
cgtgaggctccggtgcccgtcagtgggcagagcgcacatcgcccacagtccccgagaagttggggggaggggtcggcaattgaaccggtgcctagagaaggtggcgcggggtaaactgggaaagtgatgtcgtgtactggctccgcctttttcccgagggtgggggagaaccgtatataagtgcagtagtcgccgtgaacgttctttttcgcaacgggtttgccgccagaacacgcgtaag

SEQ ID NO: 1001 - DNA, 236 bp, synthetic construct
  source 1..236: mol_type = other DNA
cgtgaggctccggtgcccgtcagtgggcagagcgcacatcgcccacagtccccgagaagttggggggaggggtcggcaattgaaccggtgcctagagaaggtggcgcggggtaaactgggaaagtgatgtcgtgtactggctccgcctttttcccgagggtgggggagaaccgtatataagtgcagtagtcgccgtgaacgttctttttcgcaacgggtttgccgccagaacacag

SEQ ID NO: 1002 - DNA, 246 bp, synthetic construct
  source 1..246: mol_type = other DNA
gcatgcgtgaggctccggtgcccgtcagtgggcagagcgcacatcgcccacagtccccgagaagttggggggaggggtcggcaattgaaccggtgcctagagaaggtggcgcggggtaaactgggaaagtgatgtcgtgtactggctccgcctttttcccgagggtgggggagaaccgtatataagtgcagtagtcgccgtgaacgttctttttcgcaacgggtttgccgccagaacacgcgtaag

SEQ ID NO: 1003 - DNA, 241 bp, synthetic construct
  source 1..241: mol_type = other DNA
gcatgcgtgaggctccggtgcccgtcagtgggcagagcgcacatcgcccacagtccccgagaagttggggggaggggtcggcaattgaaccggtgcctagagaaggtggcgcggggtaaactgggaaagtgatgtcgtgtactggctccgcctttttcccgagggtgggggagaaccgtatataagtgcagtagtcgccgtgaacgttctttttcgcaacgggtttgccgccagaacacag

SEQ ID NO: 1004 - DNA, 257 bp, synthetic construct
  source 1..257: mol_type = other DNA
ggtggagaagagcatgcgtgaggctccggtgcccgtcagtgggcagagcgcacatcgcccacagtccccgagaagttggggggaggggtcggcaattgaaccggtgcctagagaaggtggcgcggggtaaactgggaaagtgatgtcgtgtactggctccgcctttttcccgagggtgggggagaaccgtatataagtgcagtagtcgccgtgaacgttctttttcgcaacgggtttgccgccagaacacgcgtaag

SEQ ID NO: 1005 - DNA, 252 bp, synthetic construct
  source 1..252: mol_type = other DNA
ggtggagaagagcatgcgtgaggctccggtgcccgtcagtgggcagagcgcacatcgcccacagtccccgagaagttggggggaggggtcggcaattgaaccggtgcctagagaaggtggcgcggggtaaactgggaaagtgatgtcgtgtactggctccgcctttttcccgagggtgggggagaaccgtatataagtgcagtagtcgccgtgaacgttctttttcgcaacgggtttgccgccagaacacag

SEQ ID NO: 1006 - DNA, 268 bp, synthetic construct
  source 1..268: mol_type = other DNA
gtcatcactgaggtggagaagagcatgcgtgaggctccggtgcccgtcagtgggcagagcgcacatcgcccacagtccccgagaagttggggggaggggtcggcaattgaaccggtgcctagagaaggtggcgcggggtaaactgggaaagtgatgtcgtgtactggctccgcctttttcccgagggtgggggagaaccgtatataagtgcagtagtcgccgtgaacgttctttttcgcaacgggtttgccgccagaacacgcgtaag

SEQ ID NO: 1007 - DNA, 263 bp, synthetic construct
  source 1..263: mol_type = other DNA
gtcatcactgaggtggagaagagcatgcgtgaggctccggtgcccgtcagtgggcagagcgcacatcgcccacagtccccgagaagttggggggaggggtcggcaattgaaccggtgcctagagaaggtggcgcggggtaaactgggaaagtgatgtcgtgtactggctccgcctttttcccgagggtgggggagaaccgtatataagtgcagtagtcgccgtgaacgttctttttcgcaacgggtttgccgccagaacacag

SEQ ID NO: 1008 - protein, 18 aa, synthetic construct
KTINGSGSPHSLLWNQQT

SEQ ID NO: 1009 - protein, 18 aa, synthetic construct
KTINGSGSPHSKAQYYVT

SEQ ID NO: 1010 - protein, 18 aa, synthetic construct
KTINGSGSPHSKLRRQQT

SEQ ID NO: 1011 - protein, 18 aa, synthetic construct
KTINGSGSPHSIWQNQQT

SEQ ID NO: 1012 - protein, 18 aa, synthetic construct
KTINGSSSPHCTAQNQQT

SEQ ID NO: 1013 - protein, 18 aa, synthetic construct
KTINGSGSPHSKAGCGQT

SEQ ID NO: 1014 - protein, 18 aa, synthetic construct
KSMNGSGSPHSRAQNQQT

SEQ ID NO: 1015 - protein, 18 aa, synthetic construct
KTINGSGSPHSKRLRQQT

SEQ ID NO: 1016 - protein, 18 aa, synthetic construct
KTINGSGSPHSLRRNQQT

SEQ ID NO: 1017 - protein, 18 aa, synthetic construct
KTINGSGSPHSRGRNQQT

SEQ ID NO: 1018 - protein, 18 aa, synthetic construct
KTINGSGSPHSEIVNQQT

SEQ ID NO: 1019 - protein, 18 aa, synthetic construct
KTINGSGSPHSSRRNQQT

SEQ ID NO: 1020 - protein, 18 aa, synthetic construct
KTINGSGSPHCLLQNQQT

SEQ ID NO: 1021 - protein, 18 aa, synthetic construct
KTIMRVGSPHSKAQNQQT

SEQ ID NO: 1022 - protein, 18 aa, synthetic construct
KTINGSGSPHSKAFRLQT

SEQ ID NO: 1023 - protein, 18 aa, synthetic construct
KTINGSGSPHCLAQNQQT

SEQ ID NO: 1024 - protein, 18 aa, synthetic construct
KTINGSCSPHRKAQNQQT

SEQ ID NO: 1025 - protein, 18 aa, synthetic construct
KTINGSGSPHFLRQNQQT

SEQ ID NO: 1026 - protein, 18 aa, synthetic construct
KTINGSGSPHSLRFNQQT

SEQ ID NO: 1027 - protein, 18 aa, synthetic construct
KTINGSGSPHSYLRNQQT

SEQ ID NO: 1028 - protein, 18 aa, synthetic construct
KTINGSGSPHCSLQNQQT

SEQ ID NO: 1029 - protein, 18 aa, synthetic construct
KTINGSGSPHVLWQNQQT

SEQ ID NO: 1030 - protein, 18 aa, synthetic construct
KTINGSGSPHSKWLLQQT

SEQ ID NO: 1031 - protein, 18 aa, synthetic construct
KTINGSGSPHSLWSNQQT

SEQ ID NO: 1032 - protein, 18 aa, synthetic construct
KTINGSGSPHSKRRLQQT

SEQ ID NO: 1033 - protein, 18 aa, synthetic construct
KTINGSGSPHSVYLNQQT

SEQ ID NO: 1034 - protein, 18 aa, synthetic construct
KTINGSGSPHSLWLNQQT

SEQ ID NO: 1035 - protein, 18 aa, synthetic construct
KTINGSGSPHSKAQRKLT

SEQ ID NO: 1036 - protein, 18 aa, synthetic construct
KTINGSGSPHSKALRRQT

SEQ ID NO: 1037 - protein, 18 aa, synthetic construct
KTINGSGSPHSKAQRLRT

SEQ ID NO: 1038 - protein, 18 aa, synthetic construct
KYLSGSGSPHSKAQNQQT

SEQ ID NO: 1039 - protein, 18 aa, synthetic construct
KTINGSGSPHSKAQRRLT

SEQ ID NO: 1040 - protein, 18 aa, synthetic construct
KTINGSGSPHSKARRQQT

SEQ ID NO: 1041 - protein, 18 aa, synthetic construct
KTINGSGSPHSKARRLQT

SEQ ID NO: 1042 - protein, 18 aa, synthetic construct
KTINGSGSPHSKSRRQQT

SEQ ID NO: 1043 - protein, 18 aa, synthetic construct
KTINGLLSPHWKAQNQQT

SEQ ID NO: 1044 - protein, 18 aa, synthetic construct
KTINGSGSPHSKARLRQT

SEQ ID NO: 1045 - protein, 18 aa, synthetic construct
KTINGSGSPHSKASKRQT

SEQ ID NO: 1046 - protein, 18 aa, synthetic construct
KTINGSGSPHVRRQNQQT

SEQ ID NO: 1047 - protein, 18 aa, synthetic construct
KTINGSGSPHSKAQLYRT

SEQ ID NO: 1048 - protein, 18 aa, synthetic construct
KGLSGSGSPHSKAQNQQT

SEQ ID NO: 1049 - protein, 18 aa, synthetic construct
KTINGSGSPHSLFRNQQT

SEQ ID NO: 1050 - protein, 18 aa, synthetic construct
KTINGSGSPHSKAQLTVT

SEQ ID NO: 1051 - protein, 18 aa, synthetic construct
KTINGSRSPHTRAQNQQT

SEQ ID NO: 1052 - protein, 18 aa, synthetic construct
KTINGSGSPHSKAKLRQT

SEQ ID NO: 1053 - protein, 18 aa, synthetic construct
KTINGSGSPHSKLIRQQT

SEQ ID NO: 1054 - protein, 18 aa, synthetic construct
KTINGSGSPHSKALRFQT

SEQ ID NO: 1055 - protein, 18 aa, synthetic construct
KTINGSGSPHSKRTFQQT

SEQ ID NO: 1056 - protein, 18 aa, synthetic construct
KTINGSGSPHSKAQKRLT

SEQ ID NO: 1057 - protein, 18 aa, synthetic construct
KTINGSGSPHLWSQNQQT

SEQ ID NO: 1058 - protein, 18 aa, synthetic construct
KTINGSGSPHLLWQNQQT

SEQ ID NO: 1059 - protein, 18 aa, synthetic construct
KTINGSGSPHSRLRNQQT

SEQ ID NO: 1060 - protein, 18 aa, synthetic construct
KTINGSGSPHSKRAAQQT

SEQ ID NO: 1061 - protein, 18 aa, synthetic construct
KTINGSGSPHSKRSWQQT

SEQ ID NO: 1062 - protein, 18 aa, synthetic construct
KTINGSGSPHSKAQLRRT

SEQ ID NO: 1063 - protein, 18 aa, synthetic construct
KTINGSGSPHYLVQNQQT

SEQ ID NO: 1064 - protein, 18 aa, synthetic construct
KTINGSGSPHSKLFRQQT

SEQ ID NO: 1065 - protein, 18 aa, synthetic construct
KTINGSGSPHSKRAMQQT

SEQ ID NO: 1066 - protein, 18 aa, synthetic construct
KTINGSGSPHSKTLRQQT

SEQ ID NO: 1067 - protein, 18 aa, synthetic construct
KTINGSGSPHSRSRNQQT

SEQ ID NO: 1068 - protein, 18 aa, synthetic construct
KTINGSGSPHRRRQNQQT

SEQ ID NO: 1069 - protein, 18 aa, synthetic construct
KTINGSGSPHSKTCLQQT

SEQ ID NO: 1070 - protein, 18 aa, synthetic construct
KTINGSGSPHSKSRWQQT

SEQ ID NO: 1071 - protein, 18 aa, synthetic construct
KTINGSGSPHRFRQNQQT

SEQ ID NO: 1072 - protein, 18 aa, synthetic construct
KTINGLRSPHRKAQNQQT

SEQ ID NO: 1073 - protein, 18 aa, synthetic construct
KTRSRSGSPHSKAQNQQT

SEQ ID NO: 1074 - protein, 18 aa, synthetic construct
KTINGSGSPHSKAQLVVT

SEQ ID NO: 1075 - protein, 18 aa, synthetic construct
KTINGSGSPHSRKLNQQT

SEQ ID NO: 1076 - protein, 18 aa, synthetic construct
KTINGSGSPHSLLCNQQT

SEQ ID NO: 1077 - protein, 18 aa, synthetic construct
KTINGKRSPHSKAQNQQT

SEQ ID NO: 1078 - protein, 18 aa, synthetic construct
KTINGSRSPHLFAQNQQT

SEQ ID NO: 1079 - protein, 18 aa, synthetic construct
KSINGSGSPHSKAHDQQT

SEQ ID NO: 1080 - protein, 18 aa, synthetic construct
KTINGSGSPHSKAQRSRT

SEQ ID NO: 1081 - protein, 18 aa, synthetic construct
KTINGSGSPHSTWLNQQT

SEQ ID NO: 1082 - protein, 18 aa, synthetic construct
KTINGSGSPHSKASRRQT

SEQ ID NO: 1083 - protein, 18 aa, synthetic construct
KTINGSGSPHSKRSMQQT

SEQ ID NO: 1084 - protein, 18 aa, synthetic construct
KTINGSGSPHSCLQNQQT

SEQ ID NO: 1085 - protein, 18 aa, synthetic construct
KTINGSGSPHSKRLWQQT

SEQ ID NO: 1086 - protein, 18 aa, synthetic construct
KTINGSGSPHSWLSNQQT

SEQ ID NO: 1087 - protein, 18 aa, synthetic construct
KTINGSGSPHLRRQNQQT

SEQ ID NO: 1088 - protein, 18 aa, synthetic construct
KTINGSGSPHSKARRSQT

SEQ ID NO: 1089 - protein, 18 aa, synthetic construct
KTINGSGSPHSKHLRQQT

SEQ ID NO: 1090 - protein, 18 aa, synthetic construct
KTINGSGSPHSCSQNQQT

SEQ ID NO: 1091 - protein, 18 aa, synthetic construct
KTINGSGSPHSKSFRQQT

SEQ ID NO: 1092 - protein, 18 aa, synthetic construct
KTINGSGSPHLCLQNQQT

SEQ ID NO: 1093 - protein, 18 aa, synthetic construct
KTINGSGSPHSKAQTSRT

SEQ ID NO: 1094 - protein, 18 aa, synthetic construct
KTINGSGSPHSLCSNQQT

SEQ ID NO: 1095 - protein, 18 aa, synthetic construct
KTINGSRSPHLRAQNQQT

SEQ ID NO: 1096 - protein, 18 aa, synthetic construct
KTINGSGSPHSKAQVSKT

SEQ ID NO: 1097 - protein, 18 aa, synthetic construct
KTINGSGSPHSKAQRHVT

SEQ ID NO: 1098 - protein, 18 aa, synthetic construct
KTINGSSSPHLCAQNQQT

SEQ ID NO: 1099 - protein, 18 aa, synthetic construct
KTINGSGSPHSFLRNQQT

SEQ ID NO: 1100 - protein, 18 aa, synthetic construct
KTINGSGSPHSFVLNQQT

SEQ ID NO: 1101 - protein, 18 aa, synthetic construct
KTINGSGSPHSKMRAQQT

SEQ ID NO: 1102 - protein, 18 aa, synthetic construct
KTINGSGSPHRPRQNQQT

SEQ ID NO: 1103 - protein, 18 aa, synthetic construct
KTINGSGSPHSKCLLQQT

SEQ ID NO: 1104 - protein, 18 aa, synthetic construct
KTINGSGSPHSKAQSRRT

SEQ ID NO: 1105 - protein, 18 aa, synthetic construct
KTINGSGSPHSRWQNQQT

SEQ ID NO: 1106 - protein, 18 aa, synthetic construct
KYSVGSGSPHSKAQNQQT

SEQ ID NO: 1107 - protein, 18 aa, synthetic construct
KTINGSGSPHSKRFLQQT

SEQ ID NO: 1108 - protein, 18 aa, synthetic construct
KTINGSGSPHSLFLNQQT

SEQ ID NO: 1109 - protein, 18 aa, synthetic construct
KTINGSGSPHSKAYLRQT

SEQ ID NO: 1110 - protein, 18 aa, synthetic construct
KTINGSGSPHSKRNGQQT

SEQ ID NO: 1111 - protein, 18 aa, synthetic construct
KTINGSGSPHTRRQNQQT

SEQ ID NO: 1112 - protein, 18 aa, synthetic construct
KTINGSGSPHSKPRLQQT

SEQ ID NO: 1113 - protein, 18 aa, synthetic construct
KTINFLRSPHSKAQNQQT

SEQ ID NO: 1114 - protein, 18 aa, synthetic construct
KTINGSGSPHLLCQNQQT

SEQ ID NO: 1115 - protein, 18 aa, synthetic construct
KTINGSGSPHSKARIVQT

SEQ ID NO: 1116 - protein, 18 aa, synthetic construct
KTINGSKSPHFKAQNQQT

SEQ ID NO: 1117 - protein, 18 aa, synthetic construct
KTINGSGSPHSKAQIRLT

SEQ ID NO: 1118 - protein, 18 aa, synthetic construct
KTINGSSSPHWVAQNQQT

SEQ ID NO: 1119 - protein, 18 aa, synthetic construct
KTINGSGSPHSKATRRQT

SEQ ID NO: 1120 - protein, 18 aa, synthetic construct
KTINGSLSPHSCAQNQQT

SEQ ID NO: 1121 - protein, 18 aa, synthetic construct
KTINGSGSPHSLYLNQQT

SEQ ID NO: 1122 - protein, 18 aa, synthetic construct
KTINGSGSPHSKVGRQQT

SEQ ID NO: 1123 - protein, 18 aa, synthetic construct
KTINGSGSPHSRRLNQQT

SEQ ID NO: 1124 - protein, 18 aa, synthetic construct
KTINGSGSPHSKAQHSRT

SEQ ID NO: 1125 - protein, 18 aa, synthetic construct
KTINGSGSPHSKAFPRQT

SEQ ID NO: 1126 - protein, 18 aa, synthetic construct
KTINGSPSPHRRAQNQQT

SEQ ID NO: 1127 - protein, 18 aa, synthetic construct
KTINGSGSPHSKRNLQQT

SEQ ID NO: 1128 - protein, 18 aa, synthetic construct
KTINGSGSPHSKPTRQQT

SEQ ID NO: 1129 - protein, 18 aa, synthetic construct
KTINGSGSPHSKLWLQQT

SEQ ID NO: 1130 - protein, 18 aa, synthetic construct
KTINGSGSPHWLAQNQQT

SEQ ID NO: 1131 - protein, 18 aa, synthetic construct
KTINGSGSPHRTRQNQQT

SEQ ID NO: 1132 - protein, 18 aa, synthetic construct
KTINGSGSPHSKLNKQQT

SEQ ID NO: 1133 - protein, 18 aa, synthetic construct
KTINGSGSPHSSLWNQQT

SEQ ID NO: 1134 - protein, 18 aa, synthetic construct
KTINGSGSPHSKAQITLT

SEQ ID NO: 1135 - protein, 18 aa, synthetic construct
KTINGSGSPHSKFLFQQT

SEQ ID NO: 1136 - protein, 18 aa, synthetic construct
KTINGSGSPHSKRTPQQT

SEQ ID NO: 1137 - protein, 18 aa, synthetic construct
KTINGSGSPHSKAQNSRR

SEQ ID NO: 1138 - protein, 18 aa, synthetic construct
KTINGSGSPHSRLKNQQT

SEQ ID NO: 1139 - protein, 18 aa, synthetic construct
KTINGSGSPHSCLLNQQT

SEQ ID NO: 1140 - protein, 18 aa, synthetic construct
KTINGSGSPHTLYQNQQT

SEQ ID NO: 1141 - protein, 18 aa, synthetic construct
KTINGSGSPHSKYPSQQT

SEQ ID NO: 1142 - protein, 18 aa, synthetic construct
KTINGSGSPHSKLRNQQT

SEQ ID NO: 1143 - protein, 18 aa, synthetic construct
KTINGSGSPHLNWQNQQT

SEQ ID NO: 1144 - protein, 18 aa, synthetic construct
KTINGVVSPHRKAQNQQT

SEQ ID NO: 1145 - protein, 18 aa, synthetic construct
KTINGSGSPHSYRPNQQT

SEQ ID NO: 1146 - protein, 18 aa, synthetic construct
KTINGSTSPHRRAQNQQT

SEQ ID NO: 1147 - protein, 18 aa, synthetic construct
KTINGSCSPHPLAQNQQT

SEQ ID NO: 1148 - protein, 18 aa, synthetic construct
KTINGSGSPHSKAFARQT

SEQ ID NO: 1149 - protein, 18 aa, synthetic construct
KTINGSGSPHSKALRYQT

SEQ ID NO: 1150 - protein, 18 aa, synthetic construct
KTINGSKSPHRLAQNQQT

SEQ ID NO: 1151 - protein, 18 aa, synthetic construct
KTINMRVSPHSKAQNQQT

SEQ ID NO: 1152 - protein, 18 aa, synthetic construct
KTINGSGSPHMYLQNQQT

SEQ ID NO: 1153 - protein, 18 aa, synthetic construct
KTINGSGSPHSKLARQQT

SEQ ID NO: 1154 - protein, 18 aa, synthetic construct
KTINGSGSPHSKARPYQT

SEQ ID NO: 1155 - protein, 18 aa, synthetic construct
KTINGSGSPHSKRVPQQT

SEQ ID NO: 1156 - protein, 18 aa, synthetic construct
KTINGSGSPHLSWQNQQT

SEQ ID NO: 1157 - protein, 18 aa, synthetic construct
KTINGRSSPHGKAQNQQT

SEQ ID NO: 1158 - protein, 18 aa, synthetic construct
KTINGSGSPHLWTQNQQT

SEQ ID NO: 1159 - protein, 18 aa, synthetic construct
KTINGLLSPHRKAQNQQT

SEQ ID NO: 1160 - protein, 18 aa, synthetic construct
KTINGSGSPHRLRQNQQT

SEQ ID NO: 1161 - protein, 18 aa, synthetic construct
KTINGSCSPHSGAQNQQT

SEQ ID NO: 1162 - protein, 18 aa, synthetic construct
KTINGSGSPHSKAQRRST

SEQ ID NO: 1163 - protein, 18 aa, synthetic construct
KTINGSGSPHSKLCSQQT

SEQ ID NO: 1164 - protein, 18 aa, synthetic construct
KTINGSGSPHSKAQLLKT

SEQ ID NO: 1165 - protein, 18 aa, synthetic construct
KTINGRKSPHSKAQNQQT

SEQ ID NO: 1166 - protein, 18 aa, synthetic construct
KTINGSGSPHLLYQNQQT

SEQ ID NO: 1167 - protein, 18 aa, synthetic construct
KTINGSGSPHSKLLRQQT

SEQ ID NO: 1168 - protein, 18 aa, synthetic construct
KTINGSGSPHSLRHNQQT

SEQ ID NO: 1169 - protein, 18 aa, synthetic construct
KTINGSGSPHSSKRNQQT

SEQ ID NO: 1170 - protein, 18 aa, synthetic construct
KTINGSGSPHSKARSRQT

SEQ ID NO: 1171 - protein, 18 aa, synthetic construct
KTINGRSSPHRKAQNQQT

SEQ ID NO: 1172 - protein, 18 aa, synthetic construct
KTINGSKSPHRTAQNQQT

SEQ ID NO: 1173 - protein, 18 aa, synthetic construct
KTINGMRSPHVKAQNQQT

SEQ ID NO: 1174 - protein, 18 aa, synthetic construct
KTINGSGSPHSKRMSQQT

SEQ ID NO: 1175 - protein, 18 aa, synthetic construct
KTINGSGSPHSKVPKQQT

SEQ ID NO: 1176 - protein, 18 aa, synthetic construct
KTINLIRSPHSKAQNQQT

SEQ ID NO: 1177 - protein, 18 aa, synthetic construct
KTINGSGSPHPFLQNQQT

SEQ ID NO: 1178 - protein, 18 aa, synthetic construct
KTINGSGSPHSKARLWQT

SEQ ID NO: 1179 - protein, 18 aa, synthetic construct
KTINGSGSPHSRTRNQQT

SEQ ID NO: 1180 - protein, 18 aa, synthetic construct
KTINGSGSPHSKRSNQQT

SEQ ID NO: 1181 - protein, 18 aa, synthetic construct
KTINGSLSPHSWAQNQQT

SEQ ID NO: 1182 - protein, 18 aa, synthetic construct
KTINGSRSPHYKAQNQQT

SEQ ID NO: 1183 - protein, 18 aa, synthetic construct
KTINRHSSPHSKAQNQQT

SEQ ID NO: 1184 - protein, 18 aa, synthetic construct
KTINGSGSPHSKRRNQQT

SEQ ID NO: 1185 - protein, 18 aa, synthetic construct
KTINGSGSPHSKAKHLQT

SEQ ID NO: 1186 - protein, 18 aa, synthetic construct
KTINGSGSPHSKRTYQQT

SEQ ID NO: 1187 - protein, 18 aa, synthetic construct
KTINGVLSPHRKAQNQQT

SEQ ID NO: 1188 - protein, 18 aa, synthetic construct
KTINGSGSPHSFITNQQT

SEQ ID NO: 1189 - protein, 18 aa, synthetic construct
KTINGSGSPHSTRLNQQT

SEQ ID NO: 1190 - protein, 18 aa, synthetic construct
KTINGSGSPHSKRTSQQT

SEQ ID NO: 1191 - protein, 18 aa, synthetic construct
KTINGSGSPHSRRSNQQT

SEQ ID NO: 1192 - protein, 18 aa, synthetic construct
KTINGHLSPHRKAQNQQT

SEQ ID NO: 1193 - protein, 18 aa, synthetic construct
KTINGSGSPHSKAQFSRT

SEQ ID NO: 1194 - protein, 18 aa, synthetic construct
KTINGSGSPHSKAQTFRT

SEQ ID NO: 1195 - protein, 18 aa, synthetic construct
KTINGSGSPHSKPLRQQT

SEQ ID NO: 1196 - protein, 18 aa, synthetic construct
KTINGSGSPHSKASCRQT

SEQ ID NO: 1197 - protein, 18 aa, synthetic construct
KTINGSGSPHSKILWQQT

SEQ ID NO: 1198 - protein, 18 aa, synthetic construct
KTINGSGSPHSKALKRQT

SEQ ID NO: 1199 - protein, 18 aa, synthetic construct
KTINGSGSPHSKAHRSQT

SEQ ID NO: 1200 - protein, 18 aa, synthetic construct
KTINGSGSPHSMLYNQQT

SEQ ID NO: 1201 - protein, 18 aa, synthetic construct
KTINGSGSPHSKCTLQQT

SEQ ID NO: 1202 - protein, 18 aa, synthetic construct
KTINGSGSPHSKAQNRMR

SEQ ID NO: 1203 - protein, 18 aa, synthetic construct
KTINGSGSPHSKLVRQQT

SEQ ID NO: 1204 - protein, 18 aa, synthetic construct
KTINGSGSPHSKRILQQT

SEQ ID NO: 1205 - protein, 18 aa, synthetic construct
KTINGSGSPHSKAQWLRT

SEQ ID NO: 1206 - protein, 18 aa, synthetic construct
KTINGSGSPHSLTCNQQT

SEQ ID NO: 1207 - protein, 18 aa, synthetic construct
KTINGIRSPHTKAQNQQT

SEQ ID NO: 1208 - protein, 18 aa, synthetic construct
KTINGSGSPHSKAQRWLT

SEQ ID NO: 1209 - protein, 18 aa, synthetic construct
KTINGSGSPHSKAQLSIT

SEQ ID NO: 1210 - protein, 18 aa, synthetic construct
KTINGSGSPHIYRQNQQT

SEQ ID NO: 1211 - protein, 18 aa, synthetic construct
KTINGSGSPHSLRSNQQT

SEQ ID NO: 1212 - protein, 18 aa, synthetic construct
KTINGSGSPHSKVKPQQT

SEQ ID NO: 1213 - protein, 18 aa, synthetic construct
KTINGSGSPHSKATRHQT

SEQ ID NO: 1214 - protein, 18 aa, synthetic construct
KTINGSLSPHLCAQNQQT

SEQ ID NO: 1215 - protein, 18 aa, synthetic construct
KTINGSGSPHSKACASQT

SEQ ID NO: 1216 - protein, 18 aa, synthetic construct
KWSPGSGSPHSKAQNQQT

SEQ ID NO: 1217 - protein, 18 aa, synthetic construct
KTINGYLSPHRKAQNQQT

SEQ ID NO: 1218 - protein, 18 aa, synthetic construct
KTINGSGSPHSKVIRQQT

SEQ ID NO: 1219 - protein, 18 aa, synthetic construct
KTINGSGSPHFLLQNQQT

SEQ ID NO: 1220 - protein, 18 aa, synthetic construct
KTINGSGSPHSKARSKQT

SEQ ID NO: 1221 - protein, 18 aa, synthetic construct
KTINGVPSPHWKAQNQQT

SEQ ID NO: 1222 - protein, 18 aa, synthetic construct
KTINGSGSPHSKATRNQT

SEQ ID NO: 1223 - protein, 18 aa, synthetic construct
KTINGSGSPHSKACSAQT

SEQ ID NO: 1224 - protein, 18 aa, synthetic construct
KTINGSGSPHSKARYVQT

SEQ ID NO: 1225 - protein, 18 aa, synthetic construct
KTINGSRSPHARAQNQQT

SEQ ID NO: 1226 - protein, 18 aa, synthetic construct
KTINGSGSPHSKAQHLRT

SEQ ID NO: 1227 - protein, 18 aa, synthetic construct
KTINGSGSPHSKAKSRQT

SEQ ID NO: 1228 - protein, 18 aa, synthetic construct
KTINGSGSPHSKIGRQQT

SEQ ID NO: 1229 - protein, 18 aa, synthetic construct
KTINGLASPHRKAQNQQT

SEQ ID NO: 1230 - protein, 18 aa, synthetic construct
KTINGSGSPHSKARTRQT

SEQ ID NO: 1231 - protein, 18 aa, synthetic construct
KTINGSGSPHSKSIRQQT

SEQ ID NO: 1232 - protein, 18 aa, synthetic construct
KTINGSGSPHSKRLYQQT

SEQ ID NO: 1233 - protein, 18 aa, synthetic construct
KTINGLPSPHRKAQNQQT

SEQ ID NO: 1234 - protein, 18 aa, synthetic construct
KTINGSLSPHRRAQNQQT

SEQ ID NO: 1235 - protein, 18 aa, synthetic construct
KTINGKTSPHGKAQNQQT

SEQ ID NO: 1236 - protein, 18 aa, synthetic construct
KTINGSRSPHRLAQNQQT

SEQ ID NO: 1237 - protein, 18 aa, synthetic construct
KTINGSGSPHSLTWNQQT

SEQ ID NO: 1238 - protein, 18 aa, synthetic construct
KTINGSKSPHRKAQNQQT

SEQ ID NO: 1239 - protein, 18 aa, synthetic construct
KTINGSGSPHSKAQLRKT

SEQ ID NO: 1240 - protein, 18 aa, synthetic construct
KTINGSGSPHSKSRHQQT

SEQ ID NO: 1241 - protein, 18 aa, synthetic construct
KTINRRLSPHSKAQNQQT

SEQ ID NO: 1242 - protein, 18 aa, synthetic construct
KTINGSGSPHSRRVNQQT

SEQ ID NO: 1243 - protein, 18 aa, synthetic construct
KTINGSGSPHSHWQNQQT

SEQ ID NO: 1244 - protein, 18 aa, synthetic construct
KTTHCSGSPHSKAQNQQT

SEQ ID NO: 1245 - protein, 18 aa, synthetic construct
KTINGSGSPHSWLQNQQT

SEQ ID NO: 1246 - protein, 18 aa, synthetic construct
KTINGSTSPHYLAQNQQT

SEQ ID NO: 1247 - protein, 18 aa, synthetic construct
KTINGLTSPHRKAQNQQT

SEQ ID NO: 1248 - protein, 18 aa, synthetic construct
KTINGSGSPHSKRLLQQT

SEQ ID NO: 1249 - protein, 18 aa, synthetic construct
KTINGSGSPHSKLCVQQT

SEQ ID NO: 1250 - protein, 18 aa, synthetic construct
KTINGFLSPHRKAQNQQT

SEQ ID NO: 1251 - protein, 18 aa, synthetic construct
KTINGSGSPHSKMRPQQT

SEQ ID NO: 1252 - protein, 18 aa, synthetic construct
KTINGSGSPHSKQTRQQT

SEQ ID NO: 1253 - protein, 18 aa, synthetic construct
KTINGSGSPHSYLINQQT

SEQ ID NO: 1254 - protein, 18 aa, synthetic construct
KTINGSGSPHSKALRSQT

SEQ ID NO: 1255 - protein, 18 aa, synthetic construct
KTINGMLSPHRKAQNQQT

SEQ ID NO: 1256 - protein, 18 aa, synthetic construct
KTINGSGSPHSKCLTQQT

SEQ ID NO: 1257 - protein, 18 aa, synthetic construct
KTINGSGSPHSKAQLTLT

SEQ ID NO: 1258 - protein, 18 aa, synthetic construct
KTINGHSSPHRKAQNQQT

SEQ ID NO: 1259 - protein, 18 aa, synthetic construct
KTINGSGSPHLTWQNQQT

SEQ ID NO: 1260 - protein, 18 aa, synthetic construct
KTINGSGSPHSKAQYCLT

SEQ ID NO: 1261 - protein, 18 aa, synthetic construct
KTINGSGSPHSFLVNQQT

SEQ ID NO: 1262 - protein, 18 aa, synthetic construct
KTINMSRSPHSKAQNQQT

SEQ ID NO: 1263 - protein, 18 aa, synthetic construct
KTINGSGSPHSKAQLHRT

SEQ ID NO: 1264 - protein, 18 aa, synthetic construct
KTINGSGSPHLYMQNQQT

SEQ ID NO: 1265 - protein, 18 aa, synthetic construct
KTINGSRSPHRRAQNQQT

SEQ ID NO: 1266 - protein, 18 aa, synthetic construct
KTINGSGSPHSKAQNRRS

SEQ ID NO: 1267 - protein, 18 aa, synthetic construct
KTINLRFSPHSKAQNQQT

SEQ ID NO: 1268 - protein, 18 aa, synthetic construct
KTINGSGSPHSKAQRLWT

SEQ ID NO: 1269 - protein, 18 aa, synthetic construct
KTINGSGSPHSKGRAQQT

SEQ ID NO: 1270 - protein, 18 aa, synthetic construct
KTINGSGSPHSLSCNQQT

SEQ ID NO: 1271 - protein, 18 aa, synthetic construct
KTINGLVSPHCKAQNQQT

SEQ ID NO: 1272 - protein, 18 aa, synthetic construct
KTINGSSSPHLWAQNQQT

SEQ ID NO: 1273 - protein, 18 aa, synthetic construct
KTINGSGSPHSKAHRLQT

SEQ ID NO: 1274 - protein, 18 aa, synthetic construct
KTINGSGSPHPYAQNQQT

SEQ ID NO: 1275 - protein, 18 aa, synthetic construct
KTINGSGSPHSTRPNQQT

SEQ ID NO: 1276 - protein, 18 aa, synthetic construct
KTINGRSSPHPKAQNQQT

SEQ ID NO: 1277 - protein, 18 aa, synthetic construct
KTINGSGSPHSKAQSWRT

SEQ ID NO: 1278 - protein, 18 aa, synthetic construct
KTINGQRSPHVKAQNQQT

SEQ ID NO: 1279 - protein, 18 aa, synthetic construct
KTINGSGSPHSKAQFVRT

SEQ ID NO: 1280 - protein, 18 aa, synthetic construct
KTINGSGSPHSKCLNQQT

SEQ ID NO: 1281 - protein, 18 aa, synthetic construct
KTINGSGSPHSSLCNQQT

SEQ ID NO: 1282 - protein, 18 aa, synthetic construct
KTINGQRSPHSKAQNQQT

SEQ ID NO: 1283 - protein, 18 aa, synthetic construct
KTINGSGSPHSLSWNQQT

SEQ ID NO: 1284 - protein, 18 aa, synthetic construct
KTINGSGSPHSSRKNQQT

SEQ ID NO: 1285 - protein, 18 aa, synthetic construct
KTINGSGSPHSKRTLQQT

SEQ ID NO: 1286 - protein, 18 aa, synthetic construct
KTINGSLSPHCLAQNQQT

SEQ ID NO: 1287 - protein, 18 aa, synthetic construct
KTINGSGSPHSKAQSSRT

SEQ ID NO: 1288 - protein, 18 aa, synthetic construct
KTINGSGSPHLKRQNQQT

SEQ ID NO: 1289 - protein, 18 aa, synthetic construct
KTINGSGSPHSKARMGQT

SEQ ID NO: 1290 - protein, 18 aa, synthetic construct
KTINGSGSPHSKAQVKLT

SEQ ID NO: 1291 - protein, 18 aa, synthetic construct
KTINGSGSPHSKLPRQQT

SEQ ID NO: 1292 - protein, 18 aa, synthetic construct
KTINGSGSPHSKLCLQQT

SEQ ID NO: 1293 - protein, 18 aa, synthetic construct
KTINGSGSPHSPLWNQQT

SEQ ID NO: 1294 - protein, 18 aa, synthetic construct
KTINGSVSPHSWAQNQQT

SEQ ID NO: 1295 - protein, 18 aa, synthetic construct
KTIRSKGSPHSKAQNQQT

SEQ ID NO: 1296 - protein, 18 aa, synthetic construct
KTINGSRSPHSWAQNQQT

SEQ ID NO: 1297 - protein, 18 aa, synthetic construct
KTINGSGSPHSKILRQQT

SEQ ID NO: 1298 - protein, 18 aa, synthetic construct
KTINGRQSPHVKAQNQQT

SEQ ID NO: 1299 - protein, 18 aa, synthetic construct
KTINGSGSPHSKAQSIKT

SEQ ID NO: 1300 - protein, 18 aa, synthetic construct
KTINGSGSPHSKAQASKT

SEQ ID NO: 1301 - protein, 18 aa, synthetic construct
KTINGSGSPHSRLFNQQT

SEQ ID NO: 1302 - protein, 18 aa, synthetic construct
KTINGSGSPHIYLQNQQT

SEQ ID NO: 1303 - protein, 18 aa, synthetic construct
KTINGSGSPHSRVRNQQT

SEQ ID NO: 1304 - protein, 18 aa, synthetic construct
KTINGSGSPHSKAVRAQT

SEQ ID NO: 1305 - protein, 18 aa, synthetic construct
KTINGSGSPHSKPARQQT

SEQ ID NO: 1306 - protein, 18 aa, synthetic construct
KTINGSGSPHSRYSNQQT

SEQ ID NO: 1307 - protein, 18 aa, synthetic construct
KTINGSRSPHRSAQNQQT

SEQ ID NO: 1308 - protein, 18 aa, synthetic construct
KTINGSLSPHIYAQNQQT

SEQ ID NO: 1309 - protein, 18 aa, synthetic construct
KTINGSGSPHSKPVRQQT

SEQ ID NO: 1310 - protein, 18 aa, synthetic construct
KTINGMRSPHGKAQNQQT

SEQ ID NO: 1311 - protein, 18 aa, synthetic construct
KTINGSGSPHSKARITQT

SEQ ID NO: 1312 - protein, 18 aa, synthetic construct
KTINGSGSPHSWSLNQQT

SEQ ID NO: 1313 - protein, 18 aa, synthetic construct
KTINTSRSPHSKAQNQQT

SEQ ID NO: 1314 - protein, 18 aa, synthetic construct
KTINGSGSPHSKAFTRQT

SEQ ID NO: 1315 - protein, 18 aa, synthetic construct
KTINGSGSPHSKAVRNQT

SEQ ID NO: 1316 - protein, 18 aa, synthetic construct
KTINGSGSPHSKAQTNRT

SEQ ID NO: 1317 - protein, 18 aa, synthetic construct
KTINGSGSPHSKANRMQT

SEQ ID NO: 1318 - protein, 18 aa, synthetic construct
KTINGSGSPHSKAQLVLT

SEQ ID NO: 1319 - protein, 18 aa, synthetic construct
KTINGSGSPHSKATRQQT

SEQ ID NO: 1320 - protein, 18 aa, synthetic construct
KTINGSGSPHSKARGTQT

SEQ ID NO: 1321 - protein, 18 aa, synthetic construct
KTINGSGSPHSKAQWSVT

SEQ ID NO: 1322 - protein, 18 aa, synthetic construct
KTINGSGSPHSKAWLIQT

SEQ ID NO: 1323 - protein, 18 aa, synthetic construct
KTINGSGSPHSKAFRPQT

SEQ ID NO: 1324 - protein, 18 aa, synthetic construct
KTINGSGSPHRRSQNQQT

SEQ ID NO: 1325 - protein, 18 aa, synthetic construct
KTINGSGSPHSKGIRQQT

SEQ ID NO: 1326 - protein, 18 aa, synthetic construct
KTINGSGSPHCTLQNQQT

SEQ ID NO: 1327 - protein, 18 aa, synthetic construct
KPLPGSGSPHSKAQNQQT

SEQ ID NO: 1328 - protein, 18 aa, synthetic construct
KTINGSGSPHLVCQNQQT

SEQ ID NO: 1329 - protein, 18 aa, synthetic construct
KTINGSGSPHSKARGYQT

SEQ ID NO: 1330 - protein, 18 aa, synthetic construct
KTINGRISPHGKAQNQQT

SEQ ID NO: 1331 - protein, 18 aa, synthetic construct
KTINGSSSPHWLAQNQQT

SEQ ID NO: 1332 - protein, 18 aa, synthetic construct
KTINGSGSPHSKARMAQT

SEQ ID NO: 1333 - protein, 18 aa, synthetic construct
KPLDGSGSPHSKAQNQQT

SEQ ID NO: 1334 - protein, 18 aa, synthetic construct
KPLRGSGSPHSKAQNQQT

SEQ ID NO: 1335 - protein, 18 aa, synthetic construct
KTINGSGSPHSKAQNAKL

SEQ ID NO: 1336 - protein, 18 aa, synthetic construct
KTINGSGSPHSKLSKQQT

SEQ ID NO: 1337 - protein, 18 aa, synthetic construct
KTINGSGSPHSKARNGQT

SEQ ID NO: 1338 - protein, 18 aa, synthetic construct
KTINGSGSPHSKAQRRQT

SEQ ID NO: 1339 - protein, 18 aa, synthetic construct
KTINGSGSPHSKWPGQQT

SEQ ID NO: 1340 - protein, 18 aa, synthetic construct
KTINGSGSPHAFLQNQQT

SEQ ID NO: 1341 - protein, 18 aa, synthetic construct
KTINGILSPHRKAQNQQT

SEQ ID NO: 1342 - protein, 18 aa, synthetic construct
KTINGSGSPHSWGSNQQT

SEQ ID NO: 1343 - protein, 18 aa, synthetic construct
KTINGSGSPHSSCLNQQT

SEQ ID NO: 1344 - protein, 18 aa, synthetic construct
KTINGSGSPHSKAQSVKT

SEQ ID NO: 1345 - protein, 18 aa, synthetic construct
KTINGSGSPHSLRYNQQT

SEQ ID NO: 1346 - protein, 18 aa, synthetic construct
KTINGSGSPHSKARKLQT

SEQ ID NO: 1347 - protein, 18 aa, synthetic construct
KHRSGSGSPHSKAQNQQT

SEQ ID NO: 1348 - protein, 18 aa, synthetic construct
KTINGSGSPHSKWSLQQT

SEQ ID NO: 1349 - protein, 18 aa, synthetic construct
KTINGSGSPHSKAQTMRT

SEQ ID NO: 1350 - protein, 18 aa, synthetic construct
KTINGSGSPHSKTIRQQT

SEQ ID NO: 1351 - protein, 18 aa, synthetic construct
KTINGKLSPHMKAQNQQT

SEQ ID NO: 1352 - protein, 18 aa, synthetic construct
KTINGSGSPHSKARPFQT

SEQ ID NO: 1353 - protein, 18 aa, synthetic construct
KTINGSGSPHSKPRVQQT

SEQ ID NO: 1354 - protein, 18 aa, synthetic construct
KTINGSGSPHSKAQVVLT

SEQ ID NO: 1355 - protein, 18 aa, synthetic construct
KTRRSSGSPHSKAQNQQT

SEQ ID NO: 1356 - protein, 18 aa, synthetic construct
KTINGSGSPHSKPSRQQT

SEQ ID NO: 1357 - protein, 18 aa, synthetic construct
KTINGSGSPHSVYRNQQT

SEQ ID NO: 1358 - protein, 18 aa, synthetic construct
KTINGSGSPHSKTCSQQT

SEQ ID NO: 1359 - protein, 18 aa, synthetic construct
KTINGSPSPHRKAQNQQT

SEQ ID NO: 1360 - protein, 18 aa, synthetic construct
KTINGRSSPHFKAQNQQT

SEQ ID NO: 1361 - protein, 18 aa, synthetic construct
KTINGSGSPHSKAQMVRT

SEQ ID NO: 1362 - protein, 18 aa, synthetic construct
KTINGSRSPHCSAQNQQT

SEQ ID NO: 1363 - protein, 18 aa, synthetic construct
KTINGSCSPHLRAQNQQT

SEQ ID NO: 1364 - protein, 18 aa, synthetic construct
KTINGSGSPHSKAQCLFT

SEQ ID NO: 1365 - protein, 18 aa, synthetic construct
KTINGRPSPHVKAQNQQT

SEQ ID NO: 1366 - protein, 18 aa, synthetic construct
KTINGSGSPHSMFPNQQT

SEQ ID NO: 1367 - protein, 18 aa, synthetic construct
KTINGMKSPHSKAQNQQT

SEQ ID NO: 1368 - protein, 18 aa, synthetic construct
KTINGSGSPHSKVRAQQT

SEQ ID NO: 1369 - protein, 18 aa, synthetic construct
KGLVGSGSPHSKAQNQQT

SEQ ID NO: 1370 - protein, 18 aa, synthetic construct
KTINGSRSPHVRAQNQQT

SEQ ID NO: 1371 - protein, 18 aa, synthetic construct
KTIRLRGSPHSKAQNQQT

SEQ ID NO: 1372 - protein, 18 aa, synthetic construct
KPRLGSGSPHSKAQNQQT

SEQ ID NO: 1373 - protein, 18 aa, synthetic construct
KTINGSGSPHSKAWYPQT

SEQ ID NO: 1374 - protein, 18 aa, synthetic construct
KTINGSCSPHVRAQNQQT

SEQ ID NO: 1375 - protein, 18 aa, synthetic construct
KTINGSGSPHSKRNVQQT

SEQ ID NO: 1376 - protein, 18 aa, synthetic construct
KTINGSGSPHSKRGLQQT

SEQ ID NO: 1377 - protein, 18 aa, synthetic construct
KTINGSGSPHSKRLAQQT

SEQ ID NO: 1378 - protein, 18 aa, synthetic construct
KTINGSGSPHSKVTRQQT

SEQ ID NO: 1379 - protein, 18 aa, synthetic construct
KTINGSGSPHTWLQNQQT

SEQ ID NO: 1380 - protein, 18 aa, synthetic construct
KTINGSGSPHSKQRSQQT

SEQ ID NO: 1381 - protein, 18 aa, synthetic construct
KTINGSGSPHSKAQRCST

SEQ ID NO: 1382 - protein, 18 aa, synthetic construct
KTINGSPSPHYLAQNQQT

SEQ ID NO: 1383 - protein, 18 aa, synthetic construct
KTINGRRSPHLKAQNQQT

SEQ ID NO: 1384 - protein, 18 aa, synthetic construct
KTINGSGSPHWSLQNQQT

SEQ ID NO: 1385 - protein, 18 aa, synthetic construct
KTINGVTSPHWKAQNQQT

SEQ ID NO: 1386 - protein, 18 aa, synthetic construct
KTINGSGSPHSKAQTTRT

SEQ ID NO: 1387 - protein, 18 aa, synthetic construct
KTINGSGSPHSKAQLFKT

SEQ ID NO: 1388 - protein, 18 aa, synthetic construct
KTINGSGSPHSKARSYQT

SEQ ID NO: 1389 - protein, 18 aa, synthetic construct
KTINGSGSPHSKLSRQQT

SEQ ID NO: 1390 - protein, 18 aa, synthetic construct
KTINGSGSPHLVFQNQQT

SEQ ID NO: 1391 - protein, 18 aa, synthetic construct
KTINGSGSPHSKAQLVKT

SEQ ID NO: 1392 - protein, 18 aa, synthetic construct
KTINGSGSPHSKAQTGRT

SEQ ID NO: 1393 - protein, 18 aa, synthetic construct
KTINGSGSPHSKARYSQT

SEQ ID NO: 1394 - protein, 18 aa, synthetic construct
KTINGRHSPHLKAQNQQT

SEQ ID NO: 1395 - protein, 18 aa, synthetic construct
KTINGSGSPHSFARNQQT

SEQ ID NO: 1396 - protein, 18 aa, synthetic construct
KTINGSGSPHSSCQNQQT

SEQ ID NO: 1397 - protein, 18 aa, synthetic construct
KTINGSGSPHSLFANQQT

SEQ ID NO: 1398 - protein, 18 aa, synthetic construct
KTINGSGSPHSKRLTQQT

SEQ ID NO: 1399 - protein, 18 aa, synthetic construct
KTINGSGSPHSKAQTART

SEQ ID NO: 1400 - protein, 18 aa, synthetic construct
KTINGSGSPHFLNQNQQT

SEQ ID NO: 1401 - protein, 18 aa, synthetic construct
KTINGSGSPHSKAQLILT

SEQ ID NO: 1402 - protein, 18 aa, synthetic construct
KEVGGSGSPHSKAQNQQT

SEQ ID NO: 1403 - protein, 18 aa, synthetic construct
KTINGSRSPHIRAQNQQT

SEQ ID NO: 1404 - protein, 18 aa, synthetic construct
KTINGSGSPHSSWLNQQT

SEQ ID NO: 1405 - protein, 18 aa, synthetic construct
KTINGSMSPHLYAQNQQT

SEQ ID NO: 1406 - protein, 18 aa, synthetic construct
KTINGMSSPHRKAQNQQT

SEQ ID NO: 1407 - protein, 18 aa, synthetic construct
KTINGSGSPHSKPRPQQT

SEQ ID NO: 1408 - protein, 18 aa, synthetic construct
KTINGSGSPHSGLWNQQT

SEQ ID NO: 1409 - protein, 18 aa, synthetic construct
KTINGSGSPHRWAQNQQT

SEQ ID NO: 1410 - protein, 18 aa, synthetic construct
KTINGSGSPHSKIRLQQT

SEQ ID NO: 1411 - protein, 18 aa, synthetic construct
KTINGSGSPHSKFSCQQT

SEQ ID NO: 1412 - protein, 18 aa, synthetic construct
KTINGSGSPHSKSCAQQT

SEQ ID NO: 1413 - protein, 18 aa, synthetic construct
KTINGSGSPHSKRLMQQT

SEQ ID NO: 1414 - protein, 18 aa, synthetic construct
KTSRCSGSPHSKAQNQQT

SEQ ID NO: 1415 - protein, 18 aa, synthetic construct
KTINGSGSPHSFLLNQQT

SEQ ID NO: 1416 - protein, 18 aa, synthetic construct
KTINGSGSPHCSAQNQQT

SEQ ID NO: 1417 - protein, 18 aa, synthetic construct
KTINGSGSPHSKAQPSKT

SEQ ID NO: 1418 - protein, 18 aa, synthetic construct
KTINGSGSPHSYVRNQQT

SEQ ID NO: 1419 - protein, 18 aa, synthetic construct
KTINGSGSPHSKAQQSRT

SEQ ID NO: 1420 - protein, 18 aa, synthetic construct
KTINGSGSPHSFVVNQQT

SEQ ID NO: 1421 - protein, 18 aa, synthetic construct
KTINGFRSPHSKAQNQQT

SEQ ID NO: 1422 - protein, 18 aa, synthetic construct
KTINGSGSPHSKWLVQQT

SEQ ID NO: 1423 - protein, 18 aa, synthetic construct
KTINGSGSPHSKRTAQQT

SEQ ID NO: 1424 - protein, 18 aa, synthetic construct
KTINGLFSPHRKAQNQQT

SEQ ID NO: 1425 - protein, 18 aa, synthetic construct
KTINTIESPHSKAQNQQT

SEQ ID NO: 1426 - protein, 18 aa, synthetic construct
KRLFGSGSPHSKAQNQQT

SEQ ID NO: 1427 - protein, 18 aa, synthetic construct
KTINGSGSPHSKAPNHLT

SEQ ID NO: 1428 - protein, 18 aa, synthetic construct
KTINGSGSPHLFRQNQQT

SEQ ID NO: 1429 - protein, 18 aa, synthetic construct
KTINGSGSPHSKASRHQT

SEQ ID NO: 1430 - protein, 18 aa, synthetic construct
KTINGSGSPHSKLSWQQT

SEQ ID NO: 1431 - protein, 18 aa, synthetic construct
KETAGSGSPHSKAQNQQT

SEQ ID NO: 1432 - protein, 18 aa, synthetic construct
KTINGHRSPHLKAQNQQT

SEQ ID NO: 1433 - protein, 18 aa, synthetic construct
KTINGSGSPHSKGCLQQT

SEQ ID NO: 1434 - protein, 18 aa, synthetic construct
KTINGSGSPHSKAQVLIT

SEQ ID NO: 1435 - protein, 18 aa, synthetic construct
KTINGSGSPHSKLRSQQT

SEQ ID NO: 1436 - protein, 18 aa, synthetic construct
KTINGTLSPHRKAQNQQT

SEQ ID NO: 1437 - protein, 18 aa, synthetic construct
KTINGSGSPHSTWTNQQT

SEQ ID NO: 1438 - protein, 18 aa, synthetic construct
KTINGSGSPHSKAQCRLT

SEQ ID NO: 1439 - protein, 18 aa, synthetic construct
KTINNLRSPHSKAQNQQT

SEQ ID NO: 1440 - protein, 18 aa, synthetic construct
KTINGSGSPHSKARANQT

SEQ ID NO: 1441 - protein, 18 aa, synthetic construct
KTINGRQSPHTKAQNQQT

SEQ ID NO: 1442 - protein, 18 aa, synthetic construct
KTINSARSPHSKAQNQQT

SEQ ID NO: 1443 - protein, 18 aa, synthetic construct
KTINGCSSPHRKAQNQQT

SEQ ID NO: 1444 - protein, 18 aa, synthetic construct
KTINGSVSPHFMAQNQQT

SEQ ID NO: 1445 - protein, 18 aa, synthetic construct
KTINGSGSPHSLCQNQQT

SEQ ID NO: 1446 - protein, 18 aa, synthetic construct
KTINGSLSPHLFAQNQQT

SEQ ID NO: 1447 - protein, 18 aa, synthetic construct
KTINGSGSPHSKACPLQT

SEQ ID NO: 1448 - protein, 18 aa, synthetic construct
KTINGRTSPHRKAQNQQT

SEQ ID NO: 1449 - protein, 18 aa, synthetic construct
KTINGSGSPHSKRATQQT

SEQ ID NO: 1450 - protein, 18 aa, synthetic construct
KTINGSGSPHSKARIMQT

SEQ ID NO: 1451 - protein, 18 aa, synthetic construct
KTINGSGSPHVTWQNQQT

SEQ ID NO: 1452 - protein, 18 aa, synthetic construct
KTINGSGSPHSKRLPQQT

SEQ ID NO: 1453 - protein, 18 aa, synthetic construct
KTINGSGSPHSKAQGFRT

SEQ ID NO: 1454 - protein, 18 aa, synthetic construct
KTINGSGSPHLYGQNQQT

SEQ ID NO: 1455 - protein, 18 aa, synthetic construct
KTINGSGSPHLSCQNQQT

SEQ ID NO: 1456 - protein, 18 aa, synthetic construct
KTINGSGSPHSKAQFTLT

SEQ ID NO: 1457 - protein, 18 aa, synthetic construct
KTINGSRSPHFKAQNQQT

SEQ ID NO: 1458 - protein, 18 aa, synthetic construct
KTINGRPSPHSKAQNQQT

SEQ ID NO: 1459 - protein, 18 aa, synthetic construct
KTINGFSSPHRKAQNQQT

SEQ ID NO: 1460 - protein, 18 aa, synthetic construct
KTINGRASPHVKAQNQQT

SEQ ID NO: 1461 - protein, 18 aa, synthetic construct
KTINGSGSPHSKAQNEVH

SEQ ID NO: 1462 - protein, 18 aa, synthetic construct
KTINGSGSPHSKRSLQQT

SEQ ID NO: 1463 - protein, 18 aa, synthetic construct
KTINGSGSPHRSRQNQQT

SEQ ID NO: 1464 - protein, 18 aa, synthetic construct
KPPTGSGSPHSKAQNQQT

SEQ ID NO: 1465 - protein, 18 aa, synthetic construct
KTINGSGSPHSKAARTQT

SEQ ID NO: 1466 - protein, 18 aa, synthetic construct
KTINGSGSPHSSWANQQT

SEQ ID NO: 1467 - protein, 18 aa, synthetic construct
KTINGSGSPHSKAQRHAT

SEQ ID NO: 1468 - protein, 18 aa, synthetic construct
KTINSPRSPHSKAQNQQT

SEQ ID NO: 1469 - protein, 18 aa, synthetic construct
KTINGSGSPHSKSERQQT

SEQ ID NO: 1470 - protein, 18 aa, synthetic construct
KTINGSGSPHALFQNQQT

SEQ ID NO: 1471 - protein, 18 aa, synthetic construct
KTINGSGSPHSKAQCYVT

SEQ ID NO: 1472 - protein, 18 aa, synthetic construct
KTINGVASPHRKAQNQQT

SEQ ID NO: 1473 - protein, 18 aa, synthetic construct
KTINGSGSPHSALWNQQT

SEQ ID NO: 1474 - protein, 18 aa, synthetic construct
KTINGSGSPHSKSVRQQT

SEQ ID NO: 1475 - protein, 18 aa, synthetic construct
KTINGSGSPHSHMENQQT

SEQ ID NO: 1476 - protein, 18 aa, synthetic construct
KTINGSGTPHSKAQNQQT

SEQ ID NO: 1477 - protein, 18 aa, synthetic construct
KTINGSGSPHSKTGRQQT

SEQ ID NO: 1478 - protein, 18 aa, synthetic construct
KTINGSGSPHSKAQANRT

SEQ ID NO: 1479 - protein, 18 aa, synthetic construct
KTINGSGSPHSKARFSQT

SEQ ID NO: 1480 - protein, 18 aa, synthetic construct
KYLLGSGSPHSKAQNQQT

SEQ ID NO: 1481 - protein, 18 aa, synthetic construct
KTINGSGSPHCSSQNQQT

SEQ ID NO: 1482 - protein, 18 aa, synthetic construct
KTINGSMSPHRKAQNQQT

SEQ ID NO: 1483 - protein, 18 aa, synthetic construct
KTINGNLSPHRKAQNQQT

SEQ ID NO: 1484 - protein, 18 aa, synthetic construct
KEVAGSGSPHSKAQNQQT

SEQ ID NO: 1485 - protein, 18 aa, synthetic construct
KTINLSRSPHSKAQNQQT

SEQ ID NO: 1486 - protein, 18 aa, synthetic construct
KTINGSGSPHSKARQQQT

SEQ ID NO: 1487 - protein, 18 aa, synthetic construct
KTINGTPSPHRKAQNQQT

SEQ ID NO: 1488 - protein, 18 aa, synthetic construct
KTINGSGSPHSKFKLQQT

SEQ ID NO: 1489 - protein, 18 aa, synthetic construct
KTINGSGSPHSKAWLLQT

SEQ ID NO: 1490 - protein, 18 aa, synthetic construct
KTINGLRSPHSKAQNQQT

SEQ ID NO: 1491 - protein, 18 aa, synthetic construct
KTINGRLSPHRKAQNQQT

SEQ ID NO: 1492 - protein, 18 aa, synthetic construct
KTINGSPSPHLFAQNQQT

SEQ ID NO: 1493 - protein, 18 aa, synthetic construct
KDLRGSGSPHSKAQNQQT

SEQ ID NO: 1494 - protein, 18 aa, synthetic construct
KTINGSGSPHSKAQLAKT

SEQ ID NO: 1495 - protein, 18 aa, synthetic construct
KTINGSGSPHSKPRSQQT

SEQ ID NO: 1496 - protein, 18 aa, synthetic construct
KTINGSGSPHSKKMSQQT

SEQ ID NO: 1497 - protein, 18 aa, synthetic construct
KTINGSGSPHSKAQLIVT

SEQ ID NO: 1498 - protein, 18 aa, synthetic construct
KTINGSGSPHSKARFTQT

SEQ ID NO: 1499 - protein, 18 aa, synthetic construct
KTINGSGSPHPLFQNQQT

SEQ ID NO: 1500 - protein, 18 aa, synthetic construct
KTINGSGSPHSKAQRGMT

SEQ ID NO: 1501 - protein, 18 aa, synthetic construct
KTINGSGSPHSKAQNLRR

SEQ ID NO: 1502 - protein, 18 aa, synthetic construct
KTINGSGSPHSKAQFRVT

SEQ ID NO: 1503 - protein, 18 aa, synthetic construct
KTINGSGSPHSKAFVRQT

SEQ ID NO: 1504 - protein, 18 aa, synthetic construct
KTINGSGSPHSKARLTQT

SEQ ID NO: 1505 - protein, 18 aa, synthetic construct
KTINGSGSPHRFKQNQQT

SEQ ID NO: 1506 - protein, 18 aa, synthetic construct
KTINGSGSPHSKEETQQT

SEQ ID NO: 1507 - protein, 18 aa, synthetic construct
KTINGSGSPHSKTRAQQT

SEQ ID NO: 1508 - protein, 18 aa, synthetic construct
KTINGSGSPHSVSWNQQT

SEQ ID NO: 1509 - protein, 18 aa, synthetic construct
KTINGSGSPHTKWQNQQT

SEQ ID NO: 1510 - protein, 18 aa, synthetic construct
KTINGSNSPHRKAQNQQT

SEQ ID NO: 1511 - protein, 18 aa, synthetic construct
KTINGSGSPHSKAQNKRS

SEQ ID NO: 1512 - protein, 18 aa, synthetic construct
KTINGSGSPHSTRQNQQT

SEQ ID NO: 1513 - protein, 18 aa, synthetic construct
KTINGTRSPHTKAQNQQT

SEQ ID NO: 1514 - protein, 18 aa, synthetic construct
KTINGSGSPHVLFQNQQT

SEQ ID NO: 1515 - protein, 18 aa, synthetic construct
KTINGSVSPHYLAQNQQT

SEQ ID NO: 1516 - protein, 18 aa, synthetic construct
KTINGALSPHRKAQNQQT

SEQ ID NO: 1517 - protein, 18 aa, synthetic construct
KTINGSGSPHSKARLYQT

SEQ ID NO: 1518 - protein, 18 aa, synthetic construct
KTINGSGSPHEHNQNQQT

SEQ ID NO: 1519 - protein, 18 aa, synthetic construct
KTINGVLSPHWKAQNQQT

SEQ ID NO: 1520 - protein, 18 aa, synthetic construct
KTINGSGSPHSKASRQQT

SEQ ID NO: 1521 - protein, 18 aa, synthetic construct
KTINGSGSPHSKRSFQQT

SEQ ID NO: 1522 - protein, 18 aa, synthetic construct
KTINGSGSPHSKRVSQQT

SEQ ID NO: 1523 - protein, 18 aa, synthetic construct
KTINGSGSPHSYSRNQQT

SEQ ID NO: 1524 - protein, 18 aa, synthetic construct
KTINGSGSPHSTVWNQQT

SEQ ID NO: 1525 - protein, 18 aa, synthetic construct
KTINGSGSPHSVLFNQQT

SEQ ID NO: 1526 - protein, 18 aa, synthetic construct
KTINGPLSPHCKAQNQQT

SEQ ID NO: 1527 - protein, 18 aa, synthetic construct
KTINGSGSPHSKRVGQQT

SEQ ID NO: 1528 - protein, 18 aa, synthetic construct
KTINGSGSPHSKLWSQQT

SEQ ID NO: 1529 - protein, 18 aa, synthetic construct
KTINGSGSPHSKAQGVRT

SEQ ID NO: 1530 - protein, 18 aa, synthetic construct
KTINGSVSPHRRAQNQQT

SEQ ID NO: 1531 - protein, 18 aa, synthetic construct
KTINGSGSPHLRFQNQQT

SEQ ID NO: 1532 - protein, 18 aa, synthetic construct
KTINGSASPHVFAQNQQT

SEQ ID NO: 1533 - protein, 18 aa, synthetic construct
KTWVRSGSPHSKAQNQQT

SEQ ID NO: 1534 - protein, 18 aa, synthetic construct
KTINGSGSPHSKARMQQT

SEQ ID NO: 1535 - protein, 18 aa, synthetic construct
KTINGSGSPHSKASRGQT

SEQ ID NO: 1536 - protein, 18 aa, synthetic construct
KTINGSGSPHSKAQVCLT

SEQ ID NO: 1537 - protein, 18 aa, synthetic construct
KTINGSGSPHSKARGVQT

SEQ ID NO: 1538 - protein, 18 aa, synthetic construct
KTINGSGSPHGLWQNQQT

SEQ ID NO: 1539 - protein, 18 aa, synthetic construct
KTINGSGSPHSKAQVWFT

SEQ ID NO: 1540 - protein, 18 aa, synthetic construct
KTINGSGSPHSKAQVTLT

SEQ ID NO: 1541 - protein, 18 aa, synthetic construct
KTINGSGSPHSKAQLRIT

SEQ ID NO: 1542 - protein, 18 aa, synthetic construct
KDSLGSGSPHSKAQNQQT

SEQ ID NO: 1543 - protein, 18 aa, synthetic construct
KTINGSGSPHSKRASQQT

SEQ ID NO: 1544 - protein, 18 aa, synthetic construct
KTINGSGSPHSKRINQQT

SEQ ID NO: 1545 - protein, 18 aa, synthetic construct
KTINGSGSPHSKASKNQT

SEQ ID NO: 1546 - protein, 18 aa, synthetic construct
KTINGSGSPHSKAQLPWT

SEQ ID NO: 1547 - protein, 18 aa, synthetic construct
KTINGSGSPHSKLTRQQT

SEQ ID NO: 1548 - protein, 18 aa, synthetic construct
KTINGSGSPHSKTNRQQT

SEQ ID NO: 1549 - protein, 18 aa, synthetic construct
KTINRVISPHSKAQNQQT

SEQ ID NO: 1550 - protein, 18 aa, synthetic construct
KTINGSGSPHTLWQNQQT

SEQ ID NO: 1551 - protein, 18 aa, synthetic construct
KTINGSGSPHSRRQNQQT

SEQ ID NO: 1552 - protein, 18 aa, synthetic construct
KTINGSGSPHSKGGRQQT

SEQ ID NO: 1553 - protein, 18 aa, synthetic construct
KTINGSESPHDSAQNQQT

SEQ ID NO: 1554 - protein, 18 aa, synthetic construct
KTINGSGSPHSRPRNQQT

SEQ ID NO: 1555 - protein, 18 aa, synthetic construct
KTINGSGSPHSRKQNQQT

SEQ ID NO: 1556 - protein, 18 aa, synthetic construct
KTINGSGSPHSKAQEELT

SEQ ID NO: 1557 - protein, 18 aa, synthetic construct
KTINGWRSPHSKAQNQQT

SEQ ID NO: 1558 - protein, 18 aa, synthetic construct
KTINGSGSPHSLLYNQQT

SEQ ID NO: 1559 - protein, 18 aa, synthetic construct
KTINGSGSPHSFRLNQQT

SEQ ID NO: 1560 - protein, 18 aa, synthetic construct
KTINGSGSPHSKAQFLRT

SEQ ID NO: 1561 - protein, 18 aa, synthetic construct
KTINGSGSPHSKQSRQQT

SEQ ID NO: 1562 - protein, 18 aa, synthetic construct
KTINGSRSPHSKAQNRQT

SEQ ID NO: 1563 - protein, 18 aa, synthetic construct
KTINGRPSPHIKAQNQQT

SEQ ID NO: 1564 - protein, 18 aa, synthetic construct
KTINGSGSPHSKRLVQQT

SEQ ID NO: 1565 - protein, 18 aa, synthetic construct
KGHEGSGSPHSKAQNQQT

SEQ ID NO: 1566 - protein, 18 aa, synthetic construct
KTINGSGSPHSKAQKRST

SEQ ID NO: 1567 - protein, 18 aa, synthetic construct
KTINGSGSPHSYLLNQQT

SEQ ID NO: 1568 - protein, 18 aa, synthetic construct
KTINGSGSPHSKPRGQQT

SEQ ID NO: 1569 - protein, 18 aa, synthetic construct
KTINGSGSPHSKTRLQQT

SEQ ID NO: 1570 - protein, 18 aa, synthetic construct
KTINGSGSPHSKSHRQQT

SEQ ID NO: 1571 - protein, 18 aa, synthetic construct
KEIKGSGSPHSKAQNQQT

SEQ ID NO: 1572 - protein, 18 aa, synthetic construct
KTINGSGSPHSKARGIQT

SEQ ID NO: 1573 - protein, 18 aa, synthetic construct
KTINGYRSPHSKAQNQQT

SEQ ID NO: 1574 - protein, 18 aa, synthetic construct
KTINGSGSPHSKLWTQQT

SEQ ID NO: 1575 - protein, 18 aa, synthetic construct
KTINGSGSPHSKPWLQQT

SEQ ID NO: 1576 - protein, 18 aa, synthetic construct
KTINGSGSPHWSVQNQQT

SEQ ID NO: 1577 - protein, 18 aa, synthetic construct
KTINGSGSPHSKVARQQT

SEQ ID NO: 1578 - protein, 18 aa, synthetic construct
KTINGSGSPHTLFQNQQT

SEQ ID NO: 1579 - protein, 18 aa, synthetic construct
KTINGSCSPHLAAQNQQT

SEQ ID NO: 1580 - protein, 18 aa, synthetic construct
KTINGSGSPHSKTSRQQT

SEQ ID NO: 1581 - protein, 18 aa, synthetic construct
KTINGSGSPHSKAQNARH

SEQ ID NO: 1582 - protein, 18 aa, synthetic construct
KTINGSGSPHSKAQLKLT

SEQ ID NO: 1583 - protein, 18 aa, synthetic construct
KTINGSGSPHSKAQNWRT

SEQ ID NO: 1584 - protein, 18 aa, synthetic construct
KTINGSGSPHFLPQNQQT

SEQ ID NO: 1585 - protein, 18 aa, synthetic construct
KTINGSGSPHSKNVRQQT

SEQ ID NO: 1586 - protein, 18 aa, synthetic construct
KTINGSGSPHFMRQNQQT

SEQ ID NO: 1587 - protein, 18 aa, synthetic construct
KTINGSGSPHGWAQNQQT

SEQ ID NO: 1588 - protein, 18 aa, synthetic construct
KTINGSGSPHFHLQNQQT

SEQ ID NO: 1589 - protein, 18 aa, synthetic construct
KTINGSASPHWSAQNQQT

SEQ ID NO: 1590 - protein, 18 aa, synthetic construct
KTINGSSSPHSWAQNQQT

SEQ ID NO: 1591 - protein, 18 aa, synthetic construct
KTINGSGSPHSKAHRQQT

SEQ ID NO: 1592 - protein, 18 aa, synthetic construct
KTINGSGSPHSKQRVQQT

SEQ ID NO: 1593 - protein, 18 aa, synthetic construct
KTLRRSGSPHSKAQNQQT

SEQ ID NO: 1594 - protein, 18 aa, synthetic construct
KTINGSGSPHSKGVRQQT

SEQ ID NO: 1595 - protein, 18 aa, synthetic construct
KTINGSLSPHTWAQNQQT

SEQ ID NO: 1596 - protein, 18 aa, synthetic construct
KTINGSGSPHSKRALQQT

SEQ ID NO: 1597 - protein, 18 aa, synthetic construct
KTINGSGSPHCLSQNQQT

SEQ ID NO: 1598 - protein, 18 aa, synthetic construct
KTINGSGSPHSKAQSLKT

SEQ ID NO: 1599 - protein, 18 aa, synthetic construct
KTINGSGSPHSFVRNQQT

SEQ ID NO: 1600 - protein, 18 aa, synthetic construct
KTINGSGSPHSIFSNQQT

SEQ ID NO: 1601 - protein, 18 aa, synthetic construct
KTINGSGSPHSKVSRQQT

SEQ ID NO: 1602 - protein, 18 aa, synthetic construct
KTINGSGSPHSKARNKQT

SEQ ID NO: 1603 - protein, 18 aa, synthetic construct
KTINASGSPHSKAQGQQT

SEQ ID NO: 1604 - protein, 18 aa, synthetic construct
KTINGSGSPHSKLRMQQT

SEQ ID NO: 1605 - protein, 18 aa, synthetic construct
KTINGSWSPHMLAQNQQT

SEQ ID NO: 1606 - protein, 18 aa, synthetic construct
KTINGSGSPHSLFPNQQT

SEQ ID NO: 1607 - protein, 18 aa, synthetic construct
KPPLGSGSPHSKAQNQQT

SEQ ID NO: 1608 - protein, 18 aa, synthetic construct
KTINGIASPHRKAQNQQT

SEQ ID NO: 1609 - protein, 18 aa, synthetic construct
KTINGSCSPHSLAQNQQT

SEQ ID NO: 1610 - protein, 18 aa, synthetic construct
KTINGRLSPHFKAQNQQT

SEQ ID NO: 1611 - protein, 18 aa, synthetic construct
KTINGSGSPHSKARMTQT

SEQ ID NO: 1612 - protein, 18 aa, synthetic construct
KTINGSGSPHSKARLQQT

SEQ ID NO: 1613 - protein, 18 aa, synthetic construct
KTINGSGSPHSKWVSQQT

SEQ ID NO: 1614 - protein, 18 aa, synthetic construct
KTINGSGSPHSKKVSQQT

SEQ ID NO: 1615 - protein, 18 aa, synthetic construct
KTINGSGSPHSKAQSYRT

SEQ ID NO: 1616 - protein, 18 aa, synthetic construct
KAFNGSGSPHSKAPNQQT

SEQ ID NO: 1617 - protein, 18 aa, synthetic construct
KTINGSGSPHSKAQYRLT

SEQ ID NO: 1618 - protein, 18 aa, synthetic construct
KTINGSWSPHLVAQNQQT

SEQ ID NO: 1619 - protein, 18 aa, synthetic construct
KTINGSGSPHSWTQNQQT

SEQ ID NO: 1620 - protein, 18 aa, synthetic construct
KTINGSGSPHSKAQSHRT

SEQ ID NO: 1621 - protein, 18 aa, synthetic construct
KGINGSGSPHGKAQNQQT

SEQ ID NO: 1622 - protein, 18 aa, synthetic construct
KTINGSGSPHSKAQNRKL

SEQ ID NO: 1623 - protein, 18 aa, synthetic construct
KTINGRYSPHSKAQNQQT

SEQ ID NO: 1624 - protein, 18 aa, synthetic construct
KTINGSGSPHSKGRSQQT

SEQ ID NO: 1625 - protein, 18 aa, synthetic construct
KTINGSGSPHCVAQNQQT

SEQ ID NO: 1626 - protein, 18 aa, synthetic construct
KTINGSGSPHSKIRPQQT

SEQ ID NO: 1627 - protein, 18 aa, synthetic construct
KTINGSGSPHSKAQSSKT

SEQ ID NO: 1628 - protein, 18 aa, synthetic construct
KTINGSGSPHSKRPFQQT

SEQ ID NO: 1629 - protein, 18 aa, synthetic construct
KTINGSSSPHCLAQNQQT

SEQ ID NO: 1630 - protein, 18 aa, synthetic construct
KTINGTRSPHAKAQNQQT

SEQ ID NO: 1631 - protein, 18 aa, synthetic construct
KTINGSGSPHLLFQNQQT

SEQ ID NO: 1632 - protein, 18 aa, synthetic construct
KTINGRRSPHTKAQNQQT

SEQ ID NO: 1633 - protein, 18 aa, synthetic construct
KTINGSGSPHSKASKQQT

SEQ ID NO: 1634 - protein, 18 aa, synthetic construct
KTINGSGSPHSKAQLGRT

SEQ ID NO: 1635 - protein, 18 aa, synthetic construct
KTINGSGSPHSVFLNQQT

SEQ ID NO: 1636 - protein, 18 aa, synthetic construct
KTINGSGSPHSKSARQQT

SEQ ID NO: 1637 - protein, 18 aa, synthetic construct
KTINGSGSPHSKLRLQQT

SEQ ID NO: 1638 - protein, 18 aa, synthetic construct
KTRKSSGSPHSKAQNQQT

SEQ ID NO: 1639 - protein, 18 aa, synthetic construct
KTINGFRSPHLKAQNQQT

SEQ ID NO: 1640 - protein, 18 aa, synthetic construct
KTINGSGSPHSKRSIQQT

SEQ ID NO: 1641 - protein, 18 aa, synthetic construct
KTINGSGSPHSKGRIQQT

SEQ ID NO: 1642 - protein, 18 aa, synthetic construct
KTINGSRSPHRPAQNQQT

SEQ ID NO: 1643 - protein, 18 aa, synthetic construct
KTINGSGSPHSKLRPQQT

SEQ ID NO: 1644 - protein, 18 aa, synthetic construct
KTINGSGSPHMYAQNQQT

SEQ ID NO: 1645 - protein, 18 aa, synthetic construct
KTINGRTSPHAKAQNQQT

SEQ ID NO: 1646 - protein, 18 aa, synthetic construct
KTINGSGSPHSKAGRGQT

SEQ ID NO: 1647 - protein, 18 aa, synthetic construct
KTINGSGSPHSKLMRQQT

SEQ ID NO: 1648 - protein, 18 aa, synthetic construct
KTINGSGSPHSKANKSQT

SEQ ID NO: 1649 - protein, 18 aa, synthetic construct
KTINGSGSPHSKAVRQQT

SEQ ID NO: 1650 - protein, 18 aa, synthetic construct
KTINGSGSPHSKCLSQQT

SEQ ID NO: 1651 - protein, 18 aa, synthetic construct
KTINGSGSPHSKAQWVLT

SEQ ID NO: 1652 - protein, 18 aa, synthetic construct
KTINGSGSPHSKAQFWVT

SEQ ID NO: 1653 - protein, 18 aa, synthetic construct
KTINGSGSPHSKALCRQT

SEQ ID NO: 1654 - protein, 18 aa, synthetic construct
KEVMGSGSPHSKAQNQQT

SEQ ID NO: 1655 - protein, 18 aa, synthetic construct
KTINGSGSPHSKNTRQQT

SEQ ID NO: 1656 - protein, 18 aa, synthetic construct
KTINGSGSPHTWTQNQQT

SEQ ID NO: 1657 - protein, 18 aa, synthetic construct
KTINGSTSPHWSAQNQQT

SEQ ID NO: 1658 - protein, 18 aa, synthetic construct
KTINGNVSPHRKAQNQQT

SEQ ID NO: 1659 - protein, 18 aa, synthetic construct
KTINGSTSPHLFAQNQQT

SEQ ID NO: 1660 - protein, 18 aa, synthetic construct
KTINGSGSPHSKAQNYRA

SEQ ID NO: 1661 - protein, 18 aa, synthetic construct
KTINGSGSPHSKARGQQT

SEQ ID NO: 1662 - protein, 18 aa, synthetic construct
KTINGSGSPHSKAQNRIR

SEQ ID NO: 1663 - protein, 18 aa, synthetic construct
KTINGSGSPHSKWTLQQT

SEQ ID NO: 1664 - protein, 18 aa, synthetic construct
KTINGSGSPHSKAQMKCT

SEQ ID NO: 1665 - protein, 18 aa, synthetic construct
KTINGSGSPHSLWQNQQT

SEQ ID NO: 1666 - protein, 18 aa, synthetic construct
KTINGSGSPHSKAQLSKT

SEQ ID NO: 1667 - protein, 18 aa, synthetic construct
KTINLIWSPHSKAQNQQT

SEQ ID NO: 1668 - protein, 18 aa, synthetic construct
KTINGSGSPHSKRVLQQT

SEQ ID NO: 1669 - protein, 18 aa, synthetic construct
KTINGSGSPHSKVRVQQT

SEQ ID NO: 1670 - protein, 18 aa, synthetic construct
KTINSRFSPHSKAQNQQT

SEQ ID NO: 1671 - protein, 18 aa, synthetic construct
KRSKGSGSPHSKAQNQQT

SEQ ID NO: 1672 - protein, 18 aa, synthetic construct
KTINGSGSPHRRLQNQQT

SEQ ID NO: 1673 - protein, 18 aa, synthetic construct
KTINGSGSPHSCAQNQQT

SEQ ID NO: 1674 - protein, 18 aa, synthetic construct
KTINGPLSPHRKAQNQQT

SEQ ID NO: 1675 - protein, 18 aa, synthetic construct
KTINGSVSPHLYAQNQQT

SEQ ID NO: 1676 - protein, 18 aa, synthetic construct
KTINGRISPHLKAQNQQT

SEQ ID NO: 1677 - protein, 18 aa, synthetic construct
KTINGSHSPHRKAQNQQT

SEQ ID NO: 1678 - protein, 18 aa, synthetic construct
KTINGSGSPHSKAQVSIT

SEQ ID NO: 1679 - protein, 18 aa, synthetic construct
KTINGSMSPHRRAQNQQT

SEQ ID NO: 1680 - protein, 18 aa, synthetic construct
KTINGRQSPHAKAQNQQT

SEQ ID NO: 1681 - protein, 18 aa, synthetic construct
KTINGSGSPHSKAVWRQT

SEQ ID NO: 1682 - protein, 18 aa, synthetic construct
KQPLGSGSPHSKAQNQQT

SEQ ID NO: 1683 - protein, 18 aa, synthetic construct
KTINGSGSPHSKAQNVKL

SEQ ID NO: 1684 - protein, 18 aa, synthetic construct
KTINGSGSPHSKRGTQQT

SEQ ID NO: 1685 - protein, 18 aa, synthetic construct
KTINGSVSPHYVAQNQQT

SEQ ID NO: 1686 - protein, 18 aa, synthetic construct
KTINGSGSPHSKNLRQQT

SEQ ID NO: 1687 - protein, 18 aa, synthetic construct
KTINGSGSPHSKAQAFRT

SEQ ID NO: 1688 - protein, 18 aa, synthetic construct
KTINGSGSPHSKCSNQQT

SEQ ID NO: 1689 - protein, 18 aa, synthetic construct
KELVGSGSPHSKAQNQQT

SEQ ID NO: 1690 - protein, 18 aa, synthetic construct
KTINGSGSPHSLVFNQQT

SEQ ID NO: 1691 - protein, 18 aa, synthetic construct
KTINGSGSPHSKAQATRT

SEQ ID NO: 1692 - protein, 18 aa, synthetic construct
KTINGTSSPHCKAQNQQT

SEQ ID NO: 1693 - protein, 18 aa, synthetic construct
KTINGSGSPHSKALWRQT

SEQ ID NO: 1694 - protein, 18 aa, synthetic construct
KTINGSGSPHSKAQFSVT

SEQ ID NO: 1695 - protein, 18 aa, synthetic construct
KTINGSGSPHSKLYMQQT

SEQ ID NO: 1696 - protein, 18 aa, synthetic construct
KTINGSLSPHYMAQNQQT

SEQ ID NO: 1697 - protein, 18 aa, synthetic construct
KTINGSGSPHSKAWLMQT

SEQ ID NO: 1698 - protein, 18 aa, synthetic construct
KTINGSGSPHSKSLKQQT

SEQ ID NO: 1699 - protein, 18 aa, synthetic construct
KTINGSGSPHSKAQNTRR

SEQ ID NO: 1700 - protein, 18 aa, synthetic construct
KTINGSGSPHYLLQNQQT

SEQ ID NO: 1701 - protein, 18 aa, synthetic construct
KTINGSGSPHTWSQNQQT

SEQ ID NO: 1702 - protein, 18 aa, synthetic construct
KTINGSGSPHSKTRMQQT

SEQ ID NO: 1703 - protein, 18 aa, synthetic construct
KTINTRPSPHSKAQNQQT

SEQ ID NO: 1704 - protein, 18 aa, synthetic construct
KTINGSGSPHSKAQILVT

SEQ ID NO: 1705 - protein, 18 aa, synthetic construct
KTINGSGSPHSKAQNAKS

SEQ ID NO: 1706 - protein, 18 aa, synthetic construct
KTINGSGSPHSRTYNQQT

SEQ ID NO: 1707 - protein, 18 aa, synthetic construct
KTINGSGSPHSKKGGQQT

SEQ ID NO: 1708 - protein, 18 aa, synthetic construct
KTINGYSSPHRKAQNQQT

SEQ ID NO: 1709 - protein, 18 aa, synthetic construct
KTINGSGSPHWVSQNQQT

SEQ ID NO: 1710 - protein, 18 aa, synthetic construct
KTINGSGSPHSKARLAQT

SEQ ID NO: 1711 - protein, 18 aa, synthetic construct
KTINGMCSPHSKAQNQQT

SEQ ID NO: 1712 - protein, 18 aa, synthetic construct
KTINGSGSPHSKSNKQQT

SEQ ID NO: 1713 - protein, 18 aa, synthetic construct
KTINGSGSPHSKAQFVLT

SEQ ID NO: 1714 - protein, 18 aa, synthetic construct
KTINGSISPHFVAQNQQT

SEQ ID NO: 1715 - protein, 18 aa, synthetic construct
KTINGSGSPHRRMQNQQT

SEQ ID NO: 1716 - protein, 18 aa, synthetic construct
KTINGSGSPHSKAWILQT

SEQ ID NO: 1717 - protein, 18 aa, synthetic construct
KTINGSGSPHSKAQGVKT

SEQ ID NO: 1718 - protein, 18 aa, synthetic construct
KTINGSGSPHSKAQFSLT

SEQ ID NO: 1719 - protein, 18 aa, synthetic construct
KTINMLRSPHSKAQNQQT

SEQ ID NO: 1720 - protein, 18 aa, synthetic construct
KTINGSGSPHSKAQLGKT

SEQ ID NO: 1721 - protein, 18 aa, synthetic construct
KTINGSGSPHSMYLNQQT

SEQ ID NO: 1722 - protein, 18 aa, synthetic construct
KTINGHDSPHVTDQNQQT

SEQ ID NO: 1723 - protein, 18 aa, synthetic construct
KTINGHDSPHKRGQHRQT

SEQ ID NO: 1724 - protein, 18 aa, synthetic construct
KMPEGHDSPHKSGQNQQT

SEQ ID NO: 1725 - protein, 18 aa, synthetic construct
KMEGGHDSPHKSGQNQQT

SEQ ID NO: 1726 - protein, 18 aa, synthetic construct
KMEYGHDSPHKSGQNQQT

SEQ ID NO: 1727 - protein, 18 aa, synthetic construct
KAEWGHDSPHKSGQNQQT

SEQ ID NO: 1728 - protein, 18 aa, synthetic construct
KCEWGHDSPHKSGQNQQT

SEQ ID NO: 1729 - protein, 18 aa, synthetic construct
KANNGQDSPHKSGQNQQT

SEQ ID NO: 1730 - protein, 18 aa, synthetic construct
KTINGHDSPHLCGQNQQT

SEQ ID NO: 1731 - protein, 18 aa, synthetic construct
KIPEGHDSPHKSGQNQQT

SEQ ID NO: 1732 - protein, 18 aa, synthetic construct
KADMGHDSPHKSGQNQQT

SEQ ID NO: 1733 - protein, 18 aa, synthetic construct
KTINGHLSPHYFGQNQQT

SEQ ID NO: 1734 - DNA, 652 bp, synthetic construct
  source 1..652: mol_type = other DNA
ctagtcgacattgattattgactagttattaatagtaatcaattacggggtcattagttcatagcccatatatggagttccgcgttacataacttacggtaaatggcccgcctggctgaccgcccaacgacccccgcccattgacgtcaataatgacgtatgttcccatagtaacgccaatagggactttccattgacgtcaatgggtggagtatttacggtaaactgcccacttggcagtacatcaagtgtatcatatgccaagtacgccccctattgacgtcaatgacggtaaatggcccgcctggcattatgcccagtacatgaccttatgggactttcctacttggcagtacatctacgtattagtcatcgctattaccatgtcgaggccacgttctgcttcactctccccatctcccccccctccccacccccaattttgtatttatttattttttaattattttgtgcagcgatgggggcggggggggggggcgcgcgccaggcggggcggggcggggcgaggggcggggcggggcgaggcggagaggtgcggcggcagccaatcagagcggcgcgctccgaaagtttccttttatggcgaggcggcggcggcggcggccctataaaaagcgaagcgcgcggcggg

SEQ ID NO: 1735 - protein, 18 aa, synthetic construct
KADYGHDSPHKSGQNQQT

SEQ ID NO: 1736 - protein, 18 aa, synthetic construct
KIETGHDSPHKSGQNQQT

SEQ ID NO: 1737 - protein, 18 aa, synthetic construct
KTINGHDSPHTNGQKQQT

SEQ ID NO: 1738 - DNA, 332 bp, synthetic construct
  source 1..332: mol_type = other DNA
tacatgaccttatgggactttcctacttggcagtacatctacgtattagtcatcgctattaccatgtcgaggccacgttctgcttcactctccccatctcccccccctccccacccccaattttgtatttatttattttttaattattttgtgcagcgatgggggcggggggggggggcgcgcgccaggcggggcggggcggggcgaggggcggggcggggcgaggcggagaggtgcggcggcagccaatcagagcggcgcgctccgaaagtttccttttatggcgaggcggcggcggcggcggccctataaaaagcgaagcgcgcggcggg

SEQ ID NO: 1739 - protein, 18 aa, synthetic construct
KTINGHDSPHWLLQNQQT

SEQ ID NO: 1740 - DNA, 260 bp, synthetic construct
  source 1..260: mol_type = other DNA
ccacgttctgcttcactctccccatctcccccccctccccacccccaattttgtatttatttattttttaattattttgtgcagcgatgggggcggggggggggggcgcgcgccaggcggggcggggcggggcgaggggcggggcggggcgaggcggagaggtgcggcggcagccaatcagagcggcgcgctccgaaagtttccttttatggcgaggcggcggcggcggcggccctataaaaagcgaagcgcgcggcggg

SEQ ID NO: 1741 - protein, 18 aa, synthetic construct
KRINGHDSPHKSGQKQQN

SEQ ID NO: 1742 - DNA, 100 bp, synthetic construct
  source 1..100: mol_type = other DNA
ggtgcggcggcagccaatcagagcggcgcgctccgaaagtttccttttatggcgaggcggcggcggcggcggccctataaaaagcgaagcgcgcggcggg

SEQ ID NO: 1743 - DNA, 588 bp, synthetic construct
  source 1..588: mol_type = other DNA
gttgacattgattattgactagttattaatagtaatcaattacggggtcattagttcatagcccatatatggagttccgcgttacataacttacggtaaatggcccgcctggctgaccgcccaacgacccccgcccattgacgtcaataatgacgtatgttcccatagtaacgccaatagggactttccattgacgtcaatgggtggagtatttacggtaaactgcccacttggcagtacatcaagtgtatcatatgccaagtacgccccctattgacgtcaatgacggtaaatggcccgcctggcattatgcccagtacatgaccttatgggactttcctacttggcagtacatctacgtattagtcatcgctattaccatggtgatgcggttttggcagtacatcaatgggcgtggatagcggtttgactcacggggatttccaagtctccaccccattgacgtcaatgggagtttgttttggcaccaaaatcaacgggactttccaaaatgtcgtaacaactccgccccattgacgcaaatgggcggtaggcgtgtacggtgggaggtctatataagcagagctc

SEQ ID NO: 1744 - protein, 18 aa, synthetic construct
KADWGHDSPHKSGQNQQT

SEQ ID NO: 1745 - protein, 18 aa, synthetic construct
KIEIGHDSPHKSGQNQQT

SEQ ID NO: 1746 - protein, 18 aa, synthetic construct
KTIKDNDSPHKSGQNQQT

SEQ ID NO: 1747 - protein, 18 aa, synthetic construct
KDIMGHDSPHKSGQNQQT

SEQ ID NO: 1748 - protein, 18 aa, synthetic construct
KFEQGHDSPHKSGQNQQT

SEQ ID NO: 1749 - protein, 18 aa, synthetic construct
KMEFGHDSPHKSGQNQQT

SEQ ID NO: 1750 - DNA, 109 bp, synthetic construct
  source 1..109: mol_type = other DNA
ttttggcaccaaaatcaacgggactttccaaaatgtcgtaacaactccgccccattgacgcaaatgggcggtaggcgtgtacggtgggaggtctatataagcagagctc

SEQ ID NO: 1751 - protein, 18 aa, synthetic construct
KLPEGHDSPHKSGQNQQT

SEQ ID NO: 1752 - protein, 18 aa, synthetic construct
KIENGHDSPHKSGQNQQT

SEQ ID NO: 1753 - protein, 18 aa, synthetic construct
KMESGHDSPHKSGQNQQT

SEQ ID NO: 1754 - protein, 18 aa, synthetic construct
KAEIGHDSPHKSGQNQQT

SEQ ID NO: 1755 - protein, 18 aa, synthetic construct
KVEYGHDSPHKSGQNQQT

SEQ ID NO: 1756 - protein, 18 aa, synthetic construct
KIINGHDSPHKSGLTQQT

SEQ ID NO: 1757 - protein, 18 aa, synthetic construct
KTSNGDDSPHKSGRNQQT

SEQ ID NO: 1758 - protein, 18 aa, synthetic construct
KIEVGHDSPHKSGQNQQT

SEQ ID NO: 1759 - protein, 18 aa, synthetic construct
KMEMGHDSPHKSGQNQQT

SEQ ID NO: 1760 - protein, 18 aa, synthetic construct
KAEVGHDSPHKSGQNQQT

SEQ ID NO: 1761 - protein, 18 aa, synthetic construct
KMDAGHDSPHKSGQNQQT

SEQ ID NO: 1762 - protein, 18 aa, synthetic construct
KVEWGHDSPHKSGQNQQT

SEQ ID NO: 1763 - protein, 18 aa, synthetic construct
KAEQGHDSPHKSGQNQQT

SEQ ID NO: 1764 - protein, 18 aa, synthetic construct
KLEWGHDSPHKSGQNQQT

SEQ ID NO: 1765 - protein, 18 aa, synthetic construct
KTINGHPSPHYLGQNQQT

SEQ ID NO: 1766 - protein, 18 aa, synthetic construct
KTINGHLSPHYYGQNQQT

SEQ ID NO: 1767 - protein, 18 aa, synthetic construct
KMELGHDSPHKSGQNQQT

SEQ ID NO: 1768 - protein, 18 aa, synthetic construct
KMETGHDSPHKSGQNQQT

SEQ ID NO: 1769 - protein, 18 aa, synthetic construct
KMEAGHDSPHKSGQNQQT

SEQ ID NO: 1770 - protein, 18 aa, synthetic construct
KTINGHDSPHLLWQNQQT

SEQ ID NO: 1771 - protein, 18 aa, synthetic construct
KTINRQRSPHKSGQNQQT

SEQ ID NO: 1772 - protein, 18 aa, synthetic construct
KIESGHDSPHKSGQNQQT

SEQ ID NO: 1773 - protein, 18 aa, synthetic construct
KTAKDHDSPHKSGQNQQT

SEQ ID NO: 1774 - protein, 18 aa, synthetic construct
KMEVGHDSPHKSGQNQQT

SEQ ID NO: 1775 - protein, 18 aa, synthetic construct
KCEIGHDSPHKSGQNQQT

SEQ ID NO: 1776 - protein, 18 aa, synthetic construct
KATNGHDSPHKSGLNQQT

SEQ ID NO: 1777 - protein, 18 aa, synthetic construct
KMDGGHDSPHKSGQNQQT

SEQ ID NO: 1778 - protein, 18 aa, synthetic construct
KQEVGHDSPHKSGQNQQT

SEQ ID NO: 1779 - protein, 18 aa, synthetic construct
KADQGHDSPHKSGQNQQT

SEQ ID NO: 1780 - protein, 18 aa, synthetic construct
KTINGHESPHKSAQNHQT

SEQ ID NO: 1781 - protein, 18 aa, synthetic construct
KTINGHDSPHKSAQNQWT

SEQ ID NO: 1782 - protein, 18 aa, synthetic construct
KNMNGHDSPHKSGQNTHS

SEQ ID NO: 1783 - protein, 18 aa, synthetic construct
KTPWEHDSPHKSGQNQQT

SEQ ID NO: 1784 - protein, 18 aa, synthetic construct
KTINGHSSPHYFGQNQQT

SEQ ID NO: 1785 - protein, 18 aa, synthetic construct
KIEMGHDSPHKSGQNQQT

SEQ ID NO: 1786 - protein, 18 aa, synthetic construct
KTANEHDSPHKSGQNQQT

SEQ ID NO: 1787 - protein, 18 aa, synthetic construct
KTINGHDSPHKSGRRRQT

SEQ ID NO: 1788 - protein, 18 aa, synthetic construct
KISNGHDSPHKSAQNQQT

SEQ ID NO: 1789 - protein, 18 aa, synthetic construct
KTGNGHDSPHKSGQYQQT

SEQ ID NO: 1790 - protein, 18 aa, synthetic construct
KTINGHYSPHLFGQNQQT

SEQ ID NO: 1791 - protein, 18 aa, synthetic construct
KTINGNYSPHKIGQNQQT

SEQ ID NO: 1792 - protein, 18 aa, synthetic construct
KTINGHDSPHKSRQNDQT

SEQ ID NO: 1793 - protein, 18 aa, synthetic construct
KQQQGHDSPHKSGQNQQT

SEQ ID NO: 1794 - protein, 18 aa, synthetic construct
KTPQDHDSPHKSGQNQQT

SEQ ID NO: 1795 - protein, 18 aa, synthetic construct
KHDWGHDSPHKSGQNQQT

SEQ ID NO: 1796 - protein, 18 aa, synthetic construct
KIEGGHDSPHKSGQNQQT

SEQ ID NO: 1797 - DNA, 4600 bp, synthetic construct
  source 1..4600: mol_type = other DNA
cctgcaggcagctgcgcgctcgctcgctcactgaggccgcccgggcaaagcccgggcgtcgggcgacctttggtcgcccggcctcagtgagcgagcgagcgcgcagagagggagtggccaactccatcactaggggttccttgtagttaatgattaacccgccatgctacttatctacgtagccatgcgtcgacataacgcgtggtgcggcggcagccaatcagagcggcgcgctccgaaagtttccttttatggcgaggcggcggcggcggcggccctataaaaagcgaagcgcgcggcgggcgggagcaagcttcgtttagtgaaccgtcagatcgcctggagacgccatccacgctgttttgacctccatagaagacaccgggaccgatccagcctccgcggattcgaatcccggccgggaacggtgcattggaacgcggattccccgtgccaagagtgacgtaagtaccgcctatagagtctataggcccacaaaaaatgctttcttcttttaatatacttttttgtttatcttatttctaatactttccctaatctctttctttcagggcaataatgatacaatgtatcatgcctctttgcaccattctaaagaataacagtgataatttctgggttaaggcaatagcaatatttctgcatataaatatttctgcatataaattgtaactgatgtaagaggtttcatattgctaatagcagctacaatccagctaccattctgcttttattttatggttgggataaggctggattattctgagtccaagctaggcccttttgctaatcatgttcatacctcttatcttcctcccacagctcctgggcaacgtgctggtctgtgtgctggcccatcactttggcaaagaattgggattcgaaccggtatgtggactctcgggcgccgcgcagtagccggcctcctggcgtcacccagcccagcccaggcccagaccctcacccgggtcccgcggccggcagagttggccccactctgcggccgccgtggcctgcgcaccgacatcgatgcgacctgcacgccccgccgcgcaagttcgaaccaacgtggcctcaaccagatttggaatgtcaaaaagcagagtgtctatttgatgaatttgaggaaatctggaactttgggccacccaggctctctagatgagaccacctatgaaagactagcagaggaaacgctggactctttagcagagttttttgaagaccttgcagacaagccatacacgtttgaggactatgatgtctcctttgggagtggtgtcttaactgtcaaactgggtggagatctaggaacctatgtgatcaacaagcagacgccaaacaagcaaatctggctatcttctccatccagtggacctaagcgttatgactggactgggaaaaactgggtgtactcccacgacggcgtgtccctccatgagctgctggccgcagagctcactaaagccttaaaaaccaaactggacttgtcttccttggcctattccggaaaagatgcttgactcgagccattgactagtacaaacaccattgtcacactccacacaaacaccattgtcacactccacacaaacaccattgtcacactccactgcagtcaggtctatcctgaggatgggtggcatccctgtgacccctccccagtgcctctcctggccctggaagttgccactccagtgcccaccagccttgtcctaataaaattaagttgcatcattttgtctgactaggtgtccttctataatattatggggtggaggggggtggtatggagcaaggggcaagttgggaagacaacctgtagggcctgcggggtctattgggaaccaagctggagtgcagtggcacaatcttggctcactgcaatctccgcctcctgggttcaagcgattctcctgcctcagcctcccgagttgttgggattccaggcatgcatgaccaggctcagctaatttttgtttttttggtagagacggggtttcaccatattggccaggctggtctccaactcctaatctcaggtgatctacccaccttggcctcccaaattgctgggattacaggcgtgaaccactgctcccttccctgtccttggcctaggtttcttgagacctctacaagagttggagttgacacttggggtactttcttggtgtaacgaactaatagcctgaaaaaaagaagtcatgtgttttcagcaaggcaagaaactgtctaacatagtagataaaacagagaacacttggccggaatcaactaagatgttgctatgttccattcatcatattatctccatctgcagagtagtgggttagtggagggtagaaaacattctcctgaacaactagttaaacttggctttgagttccacctgtaccacttgcataatcttgggaaagtgagttgcctaattcagtgacattaataaatttattaatttcttctttcaataaaacctggagagagcttcatatgtatcagcatatgctaaacttgaaagatacaagtagaaaatggaaggaaatatatctgactcaatagggatagttcaagggttaaattaaaagtagtaaagtattataattaatctgacatggtacctaatatataataatcatgtattaagaatgccagtcaccattaaaagtcaatgtatgactttaatctactcgaggaaagaaactatgtcttgttcactgttattatctctaaaatccataatcagaagagcaccatgtgtatgagccacacaataaatatctactgtataatatgtctcttcttgtttttaaccttcatagataagactctattgaattgggacattagtccagcaagccattctgtctctgtctcttctatggagggaaaggtttaaccatcaaagactaggtgcatctcccaaacaacctgaatttaatattcaaatatgtatctaaattcatttgttacatttttgtgttcagcttacatattactttttgagcgacatctattcaaggcctactacttgctgctctacaaaatattgccatgctctatttgcccattaactatttcttaaccttcaagggacatgctcagttctgatataccaagatttggtatttaccctcccagcctacatacttccaatcttaagagaacaatttttagactacattcaaatatagacctctccaccccatcaactattttatctctcctctcctatctttcttgacaaagagtgattagaaatatgcaatgtattttcattcttaaaagttctatgctaggtggctcatatattaagtcttaaataattacaaattgataaaaaaaatcagtcaataaaaattacttacgcattctggaatttgtactctccaagctgctcaaaaagctcacaattttgtttgattaaattctgaggctcttccacaagaggtttaaattcatcgaactgaaacataaaagaattgtgttaatagtattatgcctcaggatcagatgcaggttgtttttcacccctctggtcagaatgatatcctttcttcttcctactcaaagccacatgaatagatgaatatcaatgccgctctgtcacaatacattcgaactatttatttggtgagcttgcatcatgtaagtggttaagaatattcaggctctggagttcaatgaccagtatttgagccaagtcatgtaactcattcttcagttgtgcaattttacttaccatctccacatttcagaatccttatccctaaaataggggcaaagatggcactcatctcatagagctgctctgtaaaccaggtaagctaatgaaattaaacagtgccttgcatataataaaagtttaataaatgatggctatgattgtacatattattattattagttcacctttccagttagattccaggctctccaaaatgagagattttacgttggtcattgtttgtgcatggtgcctggcatacagtagcttcttgaaagcaggaaaaatgagttttctctgattctgaatagttcagaaaccattacatatgctagtgggaaccctaaaaatcctccagaacagatttcctctcctaacttaatttcttgtaaaactattcctaaacatcctcaaaaagatttgaaaatattctaaagggataggttctataatttgccataagatactaattctagtacttgattaatcctggaatcaggttaactcactttacatctaagttaaatatcttctaattaacatttaaatttaatttttttttgttctcaggattgtgaaaaagagaaaaaaagatcaaaattttttagagattgctctattcagatctttctattctaactagtctaaattttgtcctaggtatcgatgctacgtagataagtagcatggcgggttaatcattaactacagaggaacccctagtgatggagttggccactccctctctgcgcgctcgctcgctcactgaggccgggcgaccaaaggtcgcccgacgcccgggctttgcccgggcggcctcagtgagcgagcgagcgcgcagctgcctgcagg

SEQ ID NO: 1798-1799 - skipped (2 entries)

SEQ ID NO: 1800 - protein, 13 aa, synthetic construct
GHDSPHKSGQNQQ

SEQ ID NO: 1801 - DNA, 4600 bp, synthetic construct
  source 1..4600: mol_type = other DNA
cctgcaggcagctgcgcgctcgctcgctcactgaggccgcccgggcaaagcccgggcgtcgggcgacctttggtcgcccggcctcagtgagcgagcgagcgcgcagagagggagtggccaactccatcactaggggttccttgtagttaatgattaacccgccatgctacttatctacgtagccatgcgtcgacataacgcgtttttggcaccaaaatcaacgggactttccaaaatgtcgtaacaactccgccccattgacgcaaatgggcggtaggcgtgtacggtgggaggtctatataagcagagctcaagcttcgtttagtgaaccgtcagatcgcctggagacgccatccacgctgttttgacctccatagaagacaccgggaccgatccagcctccgcggattcgaatcccggccgggaacggtgcattggaacgcggattccccgtgccaagagtgacgtaagtaccgcctatagagtctataggcccacaaaaaatgctttcttcttttaatatacttttttgtttatcttatttctaatactttccctaatctctttctttcagggcaataatgatacaatgtatcatgcctctttgcaccattctaaagaataacagtgataatttctgggttaaggcaatagcaatatttctgcatataaatatttctgcatataaattgtaactgatgtaagaggtttcatattgctaatagcagctacaatccagctaccattctgcttttattttatggttgggataaggctggattattctgagtccaagctaggcccttttgctaatcatgttcatacctcttatcttcctcccacagctcctgggcaacgtgctggtctgtgtgctggcccatcactttggcaaagaattgggattcgaaccggtatgtggactctcgggcgccgcgcagtagccggcctcctggcgtcacccagcccagcccaggcccagaccctcacccgggtcccgcggccggcagagttggccccactctgcggccgccgtggcctgcgcaccgacatcgatgcgacctgcacgccccgccgcgcaagttcgaaccaacgtggcctcaaccagatttggaatgtcaaaaagcagagtgtctatttgatgaatttgaggaaatctggaactttgggccacccaggctctctagatgagaccacctatgaaagactagcagaggaaacgctggactctttagcagagttttttgaagaccttgcagacaagccatacacgtttgaggactatgatgtctcctttgggagtggtgtcttaactgtcaaactgggtggagatctaggaacctatgtgatcaacaagcagacgccaaacaagcaaatctggctatcttctccatccagtggacctaagcgttatgactggactgggaaaaactgggtgtactcccacgacggcgtgtccctccatgagctgctggccgcagagctcactaaagccttaaaaaccaaactggacttgtcttccttggcctattccggaaaagatgcttgactcgagccattgactagtacaaacaccattgtcacactccacacaaacaccattgtcacactccacacaaacaccattgtcacactccactgcagtcaggtctatcctgaggatgggtggcatccctgtgacccctccccagtgcctctcctggccctggaagttgccactccagtgcccaccagccttgtcctaataaaattaagttgcatcattttgtctgactaggtgtccttctataatattatggggtggaggggggtggtatggagcaaggggcaagttgggaagacaacctgtagggcctgcggggtctattgggaaccaagctggagtgcagtggcacaatcttggctcactgcaatctccgcctcctgggttcaagcgattctcctgcctcagcctcccgagttgttgggattccaggcatgcatgaccaggctcagctaatttttgtttttttggtagagacggggtttcaccatattggccaggctggtctccaactcctaatctcaggtgatctacccaccttggcctcccaaattgctgggattacaggcgtgaaccactgctcccttccctgtccttggcctaggtttcttgagacctctacaagagttggagttgacacttggggtactttcttggtgtaacgaactaatagcctgaaaaaaagaagtcatgtgttttcagcaaggcaagaaactgtctaacatagtagataaaacagagaacacttggccggaatcaactaagatgttgctatgttccattcatcatattatctccatctgcagagtagtgggttagtggagggtagaaaacattctcctgaacaactagttaaacttggctttgagttccacctgtaccacttgcataatcttgggaaagtgagttgcctaattcagtgacattaataaatttattaatttcttctttcaataaaacctggagagagcttcatatgtatcagcatatgctaaacttgaaagatacaagtagaaaatggaaggaaatatatctgactcaatagggatagttcaagggttaaattaaaagtagtaaagtattataattaatctgacatggtacctaatatataataatcatgtattaagaatgccagtcaccattaaaagtcaatgtatgactttaatctactcgaggaaagaaactatgtcttgttcactgttattatctctaaaatccataatcagaagagcaccatgtgtatgagccacacaataaatatctactgtataatatgtctcttcttgtttttaaccttcatagataagactctattgaattgggacattagtccagcaagccattctgtctctgtctcttctatggagggaaaggtttaaccatcaaagactaggtgcatctcccaaacaacctgaatttaatattcaaatatgtatctaaattcatttgttacatttttgtgttcagcttacatattactttttgagcgacatctattcaaggcctactacttgctgctctacaaaatattgccatgctctatttgcccattaactatttcttaaccttcaagggacatgctcagttctgatataccaagatttggtatttaccctcccagcctacatacttccaatcttaagagaacaatttttagactacattcaaatatagacctctccaccccatcaactattttatctctcctctcctatctttcttgacaaagagtgattagaaatatgcaatgtattttcattcttaaaagttctatgctaggtggctcatatattaagtcttaaataattacaaattgataaaaaaaatcagtcaataaaaattacttacgcattctggaatttgtactctccaagctgctcaaaaagctcacaattttgtttgattaaattctgaggctcttccacaagaggtttaaattcatcgaactgaaacataaaagaattgtgttaatagtattatgcctcaggatcagatgcaggttgtttttcacccctctggtcagaatgatatcctttcttcttcctactcaaagccacatgaatagatgaatatcaatgccgctctgtcacaatacattcgaactatttatttggtgagcttgcatcatgtaagtggttaagaatattcaggctctggagttcaatgaccagtatttgagccaagtcatgtaactcattcttcagttgtgcaattttacttaccatctccacatttcagaatccttatccctaaaataggggcaaagatggcactcatctcatagagctgctctgtaaaccaggtaagctaatgaaattaaacagtgccttgcatataataaaagtttaataaatgatggctatgattgtacatattattattattagttcacctttccagttagattccaggctctccaaaatgagagattttacgttggtcattgtttgtgcatggtgcctggcatacagtagcttcttgaaagcaggaaaaatgagttttctctgattctgaatagttcagaaaccattacatatgctagtgggaaccctaaaaatcctccagaacagatttcctctcctaacttaatttcttgtaaaactattcctaaacatcctcaaaaagatttgaaaatattctaaagggataggttctataatttgccataagatactaattctagtacttgattaatcctggaatcaggttaactcactttacatctaagttaaatatcttctaattaacatttaaatttaatttttttttgttctcaggattgtgaaaaagagaaaaaaagatcaaaattttttagagattgctctattcagatctttctattctaactagtctaaattttcctaggtatcgatgctacgtagataagtagcatggcgggttaatcattaactacagaggaacccctagtgatggagttggccactccctctctgcgcgctcgctcgctcactgaggccgggcgaccaaaggtcgcccgacgcccgggctttgcccgggcggcctcagtgagcgagcgagcgcgcagctgcctgcagg

SEQ ID NO: 1802 - protein, 13 aa, synthetic construct
GSGSPHSKAQNRH

SEQ ID NO: 1803 - protein, 13 aa, synthetic construct
GSGSPHSKVQNQQ

SEQ ID NO: 1804 - protein, 13 aa, synthetic construct
MSGSPHSKAQNQQ

SEQ ID NO: 1805 - protein, 13 aa, synthetic construct
GRGSPHSKAQNQQ

SEQ ID NO: 1806 - protein, 13 aa, synthetic construct
RNGSPHSKAQNQQ

SEQ ID NO: 1807 - protein, 13 aa, synthetic construct
GSGSPHSKARDQQ

SEQ ID NO: 1808 - DNA, 4600 bp, synthetic construct
  source 1..4600: mol_type = other DNA
cctgcaggcagctgcgcgctcgctcgctcactgaggccgcccgggcaaagcccgggcgtcgggcgacctttggtcgcccggcctcagtgagcgagcgagcgcgcagagagggagtggccaactccatcactaggggttccttgtagttaatgattaacccgccatgctacttatctacgtagccatgcgtcgacataacgcgttacatgaccttatgggactttcctacttggcagtacatctacgtattagtcatcgctattaccatgtcgaggccacgttctgcttcactctccccatctcccccccctccccacccccaattttgtatttatttattttttaattattttgtgcagcgatgggggcggggggggggggcgcgcgccaggcggggcggggcggggcgaggggcggggcggggcgaggcggagaggtgcggcggcagccaatcagagcggcgcgctccgaaagtttccttttatggcgaggcggcggcggcggcggccctataaaaagcgaagcgcgcggcgggcgggagcaagcttcgtttagtgaaccgtcagatcgcctggagacgccatccacgctgttttgacctccatagaagacaccgggaccgatccagcctccgcggattcgaatcccggccgggaacggtgcattggaacgcggattccccgtgccaagagtgacgtaagtaccgcctatagagtctataggcccacaaaaaatgctttcttcttttaatatacttttttgtttatcttatttctaatactttccctaatctctttctttcagggcaataatgatacaatgtatcatgcctctttgcaccattctaaagaataacagtgataatttctgggttaaggcaatagcaatatttctgcatataaatatttctgcatataaattgtaactgatgtaagaggtttcatattgctaatagcagctacaatccagctaccattctgcttttattttatggttgggataaggctggattattctgagtccaagctaggcccttttgctaatcatgttcatacctcttatcttcctcccacagctcctgggcaacgtgctggtctgtgtgctggcccatcactttggcaaagaattgggattcgaaccggtatgtggactctcgggcgccgcgcagtagccggcctcctggcgtcacccagcccagcccaggcccagaccctcacccgggtcccgcggccggcagagttggccccactctgcggccgccgtggcctgcgcaccgacatcgatgcgacctgcacgccccgccgcgcaagttcgaaccaacgtggcctcaaccagatttggaatgtcaaaaagcagagtgtctatttgatgaatttgaggaaatctggaactttgggccacccaggctctctagatgagaccacctatgaaagactagcagaggaaacgctggactctttagcagagttttttgaagaccttgcagacaagccatacacgtttgaggactatgatgtctcctttgggagtggtgtcttaactgtcaaactgggtggagatctaggaacctatgtgatcaacaagcagacgccaaacaagcaaatctggctatcttctccatccagtggacctaagcgttatgactggactgggaaaaactgggtgtactcccacgacggcgtgtccctccatgagctgctggccgcagagctcactaaagccttaaaaaccaaactggacttgtcttccttggcctattccggaaaagatgcttgactcgagccattgactagtacaaacaccattgtcacactccacacaaacaccattgtcacactccacacaaacaccattgtcacactccactgcagtcaggtctatcctgaggatgggtggcatccctgtgacccctccccagtgcctctcctggccctggaagttgccactccagtgcccaccagccttgtcctaataaaattaagttgcatcattttgtctgactaggtgtccttctataatattatggggtggaggggggtggtatggagcaaggggcaagttgggaagacaacctgtagggcctgcggggtctattgggaaccaagctggagtgcagtggcacaatcttggctcactgcaatctccgcctcctgggttcaagcgattctcctgcctcagcctcccgagttgttgggattccaggcatgcatgaccaggctcagctaatttttgtttttttggtagagacggggtttcaccatattggccaggctggtctccaactcctaatctcaggtgatctacccaccttggcctcccaaattgctgggattacaggcgtgaaccactgctcccttccctgtccttggcctagtctcctgaacaactagttaaacttggctttgagttccacctgtaccacttgcataatcttgggaaagtgagttgcctaattcagtgacattaataaatttattaatttcttctttcaataaaacctggagagagcttcatatgtatcagcatatgctaaacttgaaagatacaagtagaaaatggaaggaaatatatctgactcaatagggatagttcaagggttaaattaaaagtagtaaagtattataattaatctgacatggtacctaatatataataatcatgtattaagaatgccagtcaccattaaaagtcaatgtatgactttaatctactcgaggaaagaaactatgtcttgttcactgttattatctctaaaatccataatcagaagagcaccatgtgtatgagccacacaataaatatctactgtataatatgtctcttcttgtttttaaccttcatagataagactctattgaattgggacattagtccagcaagccattctgtctctgtctcttctatggagggaaaggtttaaccatcaaagactaggtgcatctcccaaacaacctgaatttaatattcaaatatgtatctaaattcatttgttacatttttgtgttcagcttacatattactttttgagcgacatctattcaaggcctactacttgctgctctacaaaatattgccatgctctatttgcccattaactatttcttaaccttcaagggacatgctcagttctgatataccaagatttggtatttaccctcccagcctacatacttccaatcttaagagaacaatttttagactacattcaaatatagacctctccaccccatcaactattttatctctcctctcctatctttcttgacaaagagtgattagaaatatgcaatgtattttcattcttaaaagttctatgctaggtggctcatatattaagtcttaaataattacaaattgataaaaaaaatcagtcaataaaaattacttacgcattctggaatttgtactctccaagctgctcaaaaagctcacaattttgtttgattaaattctgaggctcttccacaagaggtttaaattcatcgaactgaaacataaaagaattgtgttaatagtattatgcctcaggatcagatgcaggttgtttttcacccctctggtcagaatgatatcctttcttcttcctactcaaagccacatgaatagatgaatatcaatgccgctctgtcacaatacattcgaactatttatttggtgagcttgcatcatgtaagtggttaagaatattcaggctctggagttcaatgaccagtatttgagccaagtcatgtaactcattcttcagttgtgcaattttacttaccatctccacatttcagaatccttatccctaaaataggggcaaagatggcactcatctcatagagctgctctgtaaaccaggtaagctaatgaaattaaacagtgccttgcatataataaaagtttaataaatgatggctatgattgtacatattattattattagttcacctttccagttagattccaggctctccaaaatgagagattttacgttggtcattgtttgtgcatggtgcctggcatacagtagcttcttgaaagcaggaaaaatgagttttctctgattctgaatagttcagaaaccattacatatgctagtgggaaccctaaaaatcctccagaacagatttcctctcctaacttaatttcttgtaaaactattcctaaacatcctcaaaaagatttgaaaatattctaaagggataggttctataatttgccataagatactaattctagtacttgattaatcctggaatcaggttaactcactttacatctaagttaaatatcttctaattaacatttaaatttaatttttttttgttctcaggattgtgaaaaagagaaaaaaagatcaaaattttttagagattgctctattcagatctttctattctaactagtctaaattttgtcctaggtatcgatgctacgtagataagtagcatggcgggttaatcattaactacagaggaacccctagtgatggagttggccactccctctctgcgcgctcgctcgctcactgaggccgggcgaccaaaggtcgcccgacgcccgggctttgcccgggcggcctcagtgagcgagcgagcgcgcagctgcctgcagg

SEQ ID NO: 1809 - DNA, 4600 bp, synthetic construct
  source 1..4600: mol_type = other DNA
cctgcaggcagctgcgcgctcgctcgctcactgaggccgcccgggcaaagcccgggcgtcgggcgacctttggtcgcccggcctcagtgagcgagcgagcgcgcagagagggagtggccaactccatcactaggggttccttgtagttaatgattaacccgccatgctacttatctacgtagccatgcgtcgacataacgcgtccacgttctgcttcactctccccatctcccccccctccccacccccaattttgtatttatttattttttaattattttgtgcagcgatgggggcggggggggggggcgcgcgccaggcggggcggggcggggcgaggggcggggcggggcgaggcggagaggtgcggcggcagccaatcagagcggcgcgctccgaaagtttccttttatggcgaggcggcggcggcggcggccctataaaaagcgaagcgcgcggcgggcgggagcaagcttcgtttagtgaaccgtcagatcgcctggagacgccatccacgctgttttgacctccatagaagacaccgggaccgatccagcctccgcggattcgaatcccggccgggaacggtgcattggaacgcggattccccgtgccaagagtgacgtaagtaccgcctatagagtctataggcccacaaaaaatgctttcttcttttaatatacttttttgtttatcttatttctaatactttccctaatctctttctttcagggcaataatgatacaatgtatcatgcctctttgcaccattctaaagaataacagtgataatttctgggttaaggcaatagcaatatttctgcatataaatatttctgcatataaattgtaactgatgtaagaggtttcatattgctaatagcagctacaatccagctaccattctgcttttattttatggttgggataaggctggattattctgagtccaagctaggcccttttgctaatcatgttcatacctcttatcttcctcccacagctcctgggcaacgtgctggtctgtgtgctggcccatcactttggcaaagaattgggattcgaaccggtatgtggactctcgggcgccgcgcagtagccggcctcctggcgtcacccagcccagcccaggcccagaccctcacccgggtcccgcggccggcagagttggccccactctgcggccgccgtggcctgcgcaccgacatcgatgcgacctgcacgccccgccgcgcaagttcgaaccaacgtggcctcaaccagatttggaatgtcaaaaagcagagtgtctatttgatgaatttgaggaaatctggaactttgggccacccaggctctctagatgagaccacctatgaaagactagcagaggaaacgctggactctttagcagagttttttgaagaccttgcagacaagccatacacgtttgaggactatgatgtctcctttgggagtggtgtcttaactgtcaaactgggtggagatctaggaacctatgtgatcaacaagcagacgccaaacaagcaaatctggctatcttctccatccagtggacctaagcgttatgactggactgggaaaaactgggtgtactcccacgacggcgtgtccctccatgagctgctggccgcagagctcactaaagccttaaaaaccaaactggacttgtcttccttggcctattccggaaaagatgcttgactcgagccattgactagtacaaacaccattgtcacactccacacaaacaccattgtcacactccacacaaacaccattgtcacactccactgcagtcaggtctatcctgaggatgggtggcatccctgtgacccctccccagtgcctctcctggccctggaagttgccactccagtgcccaccagccttgtcctaataaaattaagttgcatcattttgtctgactaggtgtccttctataatattatggggtggaggggggtggtatggagcaaggggcaagttgggaagacaacctgtagggcctgcggggtctattgggaaccaagctggagtgcagtggcacaatcttggctcactgcaatctccgcctcctgggttcaagcgattctcctgcctcagcctcccgagttgttgggattccaggcatgcatgaccaggctcagctaatttttgtttttttggtagagacggggtttcaccatattggccaggctggtctccaactcctaatctcaggtgatctacccaccttggcctcccaaattgctgggattacaggcgtgaaccactgctcccttccctgtccttggcctaggatgttgctatgttccattcatcatattatctccatctgcagagtagtgggttagtggagggtagaaaacattctcctgaacaactagttaaacttggctttgagttccacctgtaccacttgcataatcttgggaaagtgagttgcctaattcagtgacattaataaatttattaatttcttctttcaataaaacctggagagagcttcatatgtatcagcatatgctaaacttgaaagatacaagtagaaaatggaaggaaatatatctgactcaatagggatagttcaagggttaaattaaaagtagtaaagtattataattaatctgacatggtacctaatatataataatcatgtattaagaatgccagtcaccattaaaagtcaatgtatgactttaatctactcgaggaaagaaactatgtcttgttcactgttattatctctaaaatccataatcagaagagcaccatgtgtatgagccacacaataaatatctactgtataatatgtctcttcttgtttttaaccttcatagataagactctattgaattgggacattagtccagcaagccattctgtctctgtctcttctatggagggaaaggtttaaccatcaaagactaggtgcatctcccaaacaacctgaatttaatattcaaatatgtatctaaattcatttgttacatttttgtgttcagcttacatattactttttgagcgacatctattcaaggcctactacttgctgctctacaaaatattgccatgctctatttgcccattaactatttcttaaccttcaagggacatgctcagttctgatataccaagatttggtatttaccctcccagcctacatacttccaatcttaagagaacaatttttagactacattcaaatatagacctctccaccccatcaactattttatctctcctctcctatctttcttgacaaagagtgattagaaatatgcaatgtattttcattcttaaaagttctatgctaggtggctcatatattaagtcttaaataattacaaattgataaaaaaaatcagtcaataaaaattacttacgcattctggaatttgtactctccaagctgctcaaaaagctcacaattttgtttgattaaattctgaggctcttccacaagaggtttaaattcatcgaactgaaacataaaagaattgtgttaatagtattatgcctcaggatcagatgcaggttgtttttcacccctctggtcagaatgatatcctttcttcttcctactcaaagccacatgaatagatgaatatcaatgccgctctgtcacaatacattcgaactatttatttggtgagcttgcatcatgtaagtggttaagaatattcaggctctggagttcaatgaccagtatttgagccaagtcatgtaactcattcttcagttgtgcaattttacttaccatctccacatttcagaatccttatccctaaaataggggcaaagatggcactcatctcatagagctgctctgtaaaccaggtaagctaatgaaattaaacagtgccttgcatataataaaagtttaataaatgatggctatgattgtacatattattattattagttcacctttccagttagattccaggctctccaaaatgagagattttacgttggtcattgtttgtgcatggtgcctggcatacagtagcttcttgaaagcaggaaaaatgagttttctctgattctgaatagttcagaaaccattacatatgctagtgggaaccctaaaaatcctccagaacagatttcctctcctaacttaatttcttgtaaaactattcctaaacatcctcaaaaagatttgaaaatattctaaagggataggttctataatttgccataagatactaattctagtacttgattaatcctggaatcaggttaactcactttacatctaagttaaatatcttctaattaacatttaaatttaatttttttttgttctcaggattgtgaaaaagagaaaaaaagatcaaaattttttagagattgctctattcagatctttctattctaactagtctaaattttgtcctaggtatcgatgctacgtagataagtagcatggcgggttaatcattaactacagaggaacccctagtgatggagttggccactccctctctgcgcgctcgctcgctcactgaggccgggcgaccaaaggtcgcccgacgcccgggctttgcccgggcggcctcagtgagcgagcgagcgcgcagctgcctgcagg

SEQ ID NO: 1810 - protein, 13 aa, synthetic construct
GSGSPHSKAHVRQ

SEQ ID NO: 1811 - DNA, 141 bp, synthetic construct
  source 1..141: mol_type = other DNA
cctgcaggcagctgcgcgctcgctcgctcactgaggccgcccgggcaaagcccgggcgtcgggcgacctttggtcgcccggcctcagtgagcgagcgagcgcgcagagagggagtggccaactccatcactaggggttcct

SEQ ID NO: 1812 - DNA, 141 bp, synthetic construct
  source 1..141: mol_type = other DNA
aggaacccctagtgatggagttggccactccctctctgcgcgctcgctcgctcactgaggccgggcgaccaaaggtcgcccgacgcccgggctttgcccgggcggcctcagtgagcgagcgagcgcgcagctgcctgcagg

SEQ ID NO: 1813 - protein, 13 aa, synthetic construct
GPGSPHSKAHNQQ

SEQ ID NO: 1814 - protein, 13 aa, synthetic construct
GSGSPHSKTQSQQ

SEQ ID NO: 1815 - protein, 13 aa, synthetic construct
ESGSPHSKAQNQQ

SEQ ID NO: 1816 - DNA, 566 bp, synthetic construct
  source 1..566: mol_type = other DNA
tcagatcgcctggagacgccatccacgctgttttgacctccatagaagacaccgggaccgatccagcctccgcggattcgaatcccggccgggaacggtgcattggaacgcggattccccgtgccaagagtgacgtaagtaccgcctatagagtctataggcccacaaaaaatgctttcttcttttaatatacttttttgtttatcttatttctaatactttccctaatctctttctttcagggcaataatgatacaatgtatcatgcctctttgcaccattctaaagaataacagtgataatttctgggttaaggcaatagcaatatttctgcatataaatatttctgcatataaattgtaactgatgtaagaggtttcatattgctaatagcagctacaatccagctaccattctgcttttattttatggttgggataaggctggattattctgagtccaagctaggcccttttgctaatcatgttcatacctcttatcttcctcccacagctcctgggcaacgtgctggtctgtgtgctggcccatcactttggcaaagaatt

SEQ ID NO: 1817 - DNA, 134 bp, synthetic construct
  source 1..134: mol_type = other DNA
tcagatcgcctggagacgccatccacgctgttttgacctccatagaagacaccgggaccgatccagcctccgcggattcgaatcccggccgggaacggtgcattggaacgcggattccccgtgccaagagtgac

SEQ ID NO: 1818 - protein, 13 aa, synthetic construct
GNGSPHSKAQNQQ

SEQ ID NO: 1819 - DNA, 32 bp, synthetic construct
  source 1..32: mol_type = other DNA
gtaagtaccgcctatagagtctataggcccac

SEQ ID NO: 1820 - DNA, 347 bp, synthetic construct
  source 1..347: mol_type = other DNA
aaaaaatgctttcttcttttaatatacttttttgtttatcttatttctaatactttccctaatctctttctttcagggcaataatgatacaatgtatcatgcctctttgcaccattctaaagaataacagtgataatttctgggttaaggcaatagcaatatttctgcatataaatatttctgcatataaattgtaactgatgtaagaggtttcatattgctaatagcagctacaatccagctaccattctgcttttattttatggttgggataaggctggattattctgagtccaagctaggcccttttgctaatcatgttcatacctcttatcttcctcccacag

SEQ ID NO: 1821 - DNA, 53 bp, synthetic construct
  source 1..53: mol_type = other DNA
ctcctgggcaacgtgctggtctgtgtgctggcccatcactttggcaaagaatt

SEQ ID NO: 1822 - protein, 13 aa, synthetic construct
GSGSPHSKSQNQL

SEQ ID NO: 1823 - protein, 13 aa, synthetic construct
NSGSPHSKAQNQQ

SEQ ID NO: 1824 - DNA, 633 bp, synthetic construct
  source 1..633: mol_type = other DNA
atgtggactctcgggcgccgcgcagtagccggcctcctggcgtcacccagcccagcccaggcccagaccctcacccgggtcccgcggccggcagagttggccccactctgcggccgccgtggcctgcgcaccgacatcgatgcgacctgcacgccccgccgcgcaagttcgaaccaacgtggcctcaaccagatttggaatgtcaaaaagcagagtgtctatttgatgaatttgaggaaatctggaactttgggccacccaggctctctagatgagaccacctatgaaagactagcagaggaaacgctggactctttagcagagttttttgaagaccttgcagacaagccatacacgtttgaggactatgatgtctcctttgggagtggtgtcttaactgtcaaactgggtggagatctaggaacctatgtgatcaacaagcagacgccaaacaagcaaatctggctatcttctccatccagtggacctaagcgttatgactggactgggaaaaactgggtgtactcccacgacggcgtgtccctccatgagctgctggccgcagagctcactaaagccttaaaaaccaaactggacttgtcttccttggcctattccggaaaagatgcttga

SEQ ID NO: 1825 - protein, 13 aa, synthetic construct
VSGSPHSKAQNQQ

SEQ ID NO: 1826 - DNA, 71 bp, synthetic construct
  source 1..71: mol_type = other DNA
acaaacaccattgtcacactccacacaaacaccattgtcacactccacacaaacaccattgtcacactcca

SEQ ID NO: 1827 - DNA, 23 bp, synthetic construct
  source 1..23: mol_type = other DNA
acaaacaccattgtcacactcca

SEQ ID NO: 1828 - DNA, 477 bp, synthetic construct
  source 1..477: mol_type = other DNA
gggtggcatccctgtgacccctccccagtgcctctcctggccctggaagttgccactccagtgcccaccagccttgtcctaataaaattaagttgcatcattttgtctgactaggtgtccttctataatattatggggtggaggggggtggtatggagcaaggggcaagttgggaagacaacctgtagggcctgcggggtctattgggaaccaagctggagtgcagtggcacaatcttggctcactgcaatctccgcctcctgggttcaagcgattctcctgcctcagcctcccgagttgttgggattccaggcatgcatgaccaggctcagctaatttttgtttttttggtagagacggggtttcaccatattggccaggctggtctccaactcctaatctcaggtgatctacccaccttggcctcccaaattgctgggattacaggcgtgaaccactgctcccttccctgtcctt

SEQ ID NO: 1829 - protein, 13 aa, synthetic construct
GSGSPHSKTQNQQ

SEQ ID NO: 1830 - protein, 13 aa, synthetic construct
GGGSPHSKAQTQQ

SEQ ID NO: 1831 - protein, 13 aa, synthetic construct
GSGSPHSKAQNPP

SEQ ID NO: 1832 - protein, 13 aa, synthetic construct
GSGSPHSKAQNLQ

SEQ ID NO: 1833 - protein, 13 aa, synthetic construct
GGGSPHSKAQNQQ

SEQ ID NO: 1834 - protein, 13 aa, synthetic construct
GSGSPHSKAQYQQ

SEQ ID NO: 1835 - protein, 13 aa, synthetic construct
GGGSPHSKAQNKQ

SEQ ID NO: 1836 - protein, 13 aa, synthetic construct
GSGSPHSKAQDQE

SEQ ID NO: 1837 - protein, 13 aa, synthetic construct
KSGSPHSKAQNQQ

SEQ ID NO: 1838 - DNA, 2034 bp, synthetic construct
  source 1..2034: mol_type = other DNA
tctcctgaacaactagttaaacttggctttgagttccacctgtaccacttgcataatcttgggaaagtgagttgcctaattcagtgacattaataaatttattaatttcttctttcaataaaacctggagagagcttcatatgtatcagcatatgctaaacttgaaagatacaagtagaaaatggaaggaaatatatctgactcaatagggatagttcaagggttaaattaaaagtagtaaagtattataattaatctgacatggtacctaatatataataatcatgtattaagaatgccagtcaccattaaaagtcaatgtatgactttaatctactcgaggaaagaaactatgtcttgttcactgttattatctctaaaatccataatcagaagagcaccatgtgtatgagccacacaataaatatctactgtataatatgtctcttcttgtttttaaccttcatagataagactctattgaattgggacattagtccagcaagccattctgtctctgtctcttctatggagggaaaggtttaaccatcaaagactaggtgcatctcccaaacaacctgaatttaatattcaaatatgtatctaaattcatttgttacatttttgtgttcagcttacatattactttttgagcgacatctattcaaggcctactacttgctgctctacaaaatattgccatgctctatttgcccattaactatttcttaaccttcaagggacatgctcagttctgatataccaagatttggtatttaccctcccagcctacatacttccaatcttaagagaacaatttttagactacattcaaatatagacctctccaccccatcaactattttatctctcctctcctatctttcttgacaaagagtgattagaaatatgcaatgtattttcattcttaaaagttctatgctaggtggctcatatattaagtcttaaataattacaaattgataaaaaaaatcagtcaataaaaattacttacgcattctggaatttgtactctccaagctgctcaaaaagctcacaattttgtttgattaaattctgaggctcttccacaagaggtttaaattcatcgaactgaaacataaaagaattgtgttaatagtattatgcctcaggatcagatgcaggttgtttttcacccctctggtcagaatgatatcctttcttcttcctactcaaagccacatgaatagatgaatatcaatgccgctctgtcacaatacattcgaactatttatttggtgagcttgcatcatgtaagtggttaagaatattcaggctctggagttcaatgaccagtatttgagccaagtcatgtaactcattcttcagttgtgcaattttacttaccatctccacatttcagaatccttatccctaaaataggggcaaagatggcactcatctcatagagctgctctgtaaaccaggtaagctaatgaaattaaacagtgccttgcatataataaaagtttaataaatgatggctatgattgtacatattattattattagttcacctttccagttagattccaggctctccaaaatgagagattttacgttggtcattgtttgtgcatggtgcctggcatacagtagcttcttgaaagcaggaaaaatgagttttctctgattctgaatagttcagaaaccattacatatgctagtgggaaccctaaaaatcctccagaacagatttcctctcctaacttaatttcttgtaaaactattcctaaacatcctcaaaaagatttgaaaatattctaaagggataggttctataatttgccataagatactaattctagtacttgattaatcctggaatcaggttaactcactttacatctaagttaaatatcttctaattaacatttaaatttaatttttttttgttctcaggattgtgaaaaagagaaaaaaagatcaaaattttttagagattgctctattcagatctttctattctaactagtctaaattttgtcctag

SEQ ID NO: 1839 - DNA, 2106 bp, synthetic construct
  source 1..2106: mol_type = other DNA
gatgttgctatgttccattcatcatattatctccatctgcagagtagtgggttagtggagggtagaaaacattctcctgaacaactagttaaacttggctttgagttccacctgtaccacttgcataatcttgggaaagtgagttgcctaattcagtgacattaataaatttattaatttcttctttcaataaaacctggagagagcttcatatgtatcagcatatgctaaacttgaaagatacaagtagaaaatggaaggaaatatatctgactcaatagggatagttcaagggttaaattaaaagtagtaaagtattataattaatctgacatggtacctaatatataataatcatgtattaagaatgccagtcaccattaaaagtcaatgtatgactttaatctactcgaggaaagaaactatgtcttgttcactgttattatctctaaaatccataatcagaagagcaccatgtgtatgagccacacaataaatatctactgtataatatgtctcttcttgtttttaaccttcatagataagactctattgaattgggacattagtccagcaagccattctgtctctgtctcttctatggagggaaaggtttaaccatcaaagactaggtgcatctcccaaacaacctgaatttaatattcaaatatgtatctaaattcatttgttacatttttgtgttcagcttacatattactttttgagcgacatctattcaaggcctactacttgctgctctacaaaatattgccatgctctatttgcccattaactatttcttaaccttcaagggacatgctcagttctgatataccaagatttggtatttaccctcccagcctacatacttccaatcttaagagaacaatttttagactacattcaaatatagacctctccaccccatcaactattttatctctcctctcctatctttcttgacaaagagtgattagaaatatgcaatgtattttcattcttaaaagttctatgctaggtggctcatatattaagtcttaaataattacaaattgataaaaaaaatcagtcaataaaaattacttacgcattctggaatttgtactctccaagctgctcaaaaagctcacaattttgtttgattaaattctgaggctcttccacaagaggtttaaattcatcgaactgaaacataaaagaattgtgttaatagtattatgcctcaggatcagatgcaggttgtttttcacccctctggtcagaatgatatcctttcttcttcctactcaaagccacatgaatagatgaatatcaatgccgctctgtcacaatacattcgaactatttatttggtgagcttgcatcatgtaagtggttaagaatattcaggctctggagttcaatgaccagtatttgagccaagtcatgtaactcattcttcagttgtgcaattttacttaccatctccacatttcagaatccttatccctaaaataggggcaaagatggcactcatctcatagagctgctctgtaaaccaggtaagctaatgaaattaaacagtgccttgcatataataaaagtttaataaatgatggctatgattgtacatattattattattagttcacctttccagttagattccaggctctccaaaatgagagattttacgttggtcattgtttgtgcatggtgcctggcatacagtagcttcttgaaagcaggaaaaatgagttttctctgattctgaatagttcagaaaccattacatatgctagtgggaaccctaaaaatcctccagaacagatttcctctcctaacttaatttcttgtaaaactattcctaaacatcctcaaaaagatttgaaaatattctaaagggataggttctataatttgccataagatactaattctagtacttgattaatcctggaatcaggttaactcactttacatctaagttaaatatcttctaattaacatttaaatttaatttttttttgttctcaggattgtgaaaaagagaaaaaaagatcaaaattttttagagattgctctattcagatctttctattctaactagtctaaattttgtcctag

SEQ ID NO: 1840 - DNA, 2264 bp, synthetic construct
  source 1..2264: mol_type = other DNA
ctaggtttcttgagacctctacaagagttggagttgacacttggggtactttcttggtgtaacgaactaatagcctgaaaaaaagaagtcatgtgttttcagcaaggcaagaaactgtctaacatagtagataaaacagagaacacttggccggaatcaactaagatgttgctatgttccattcatcatattatctccatctgcagagtagtgggttagtggagggtagaaaacattctcctgaacaactagttaaacttggctttgagttccacctgtaccacttgcataatcttgggaaagtgagttgcctaattcagtgacattaataaatttattaatttcttctttcaataaaacctggagagagcttcatatgtatcagcatatgctaaacttgaaagatacaagtagaaaatggaaggaaatatatctgactcaatagggatagttcaagggttaaattaaaagtagtaaagtattataattaatctgacatggtacctaatatataataatcatgtattaagaatgccagtcaccattaaaagtcaatgtatgactttaatctactcgaggaaagaaactatgtcttgttcactgttattatctctaaaatccataatcagaagagcaccatgtgtatgagccacacaataaatatctactgtataatatgtctcttcttgtttttaaccttcatagataagactctattgaattgggacattagtccagcaagccattctgtctctgtctcttctatggagggaaaggtttaaccatcaaagactaggtgcatctcccaaacaacctgaatttaatattcaaatatgtatctaaattcatttgttacatttttgtgttcagcttacatattactttttgagcgacatctattcaaggcctactacttgctgctctacaaaatattgccatgctctatttgcccattaactatttcttaaccttcaagggacatgctcagttctgatataccaagatttggtatttaccctcccagcctacatacttccaatcttaagagaacaatttttagactacattcaaatatagacctctccaccccatcaactattttatctctcctctcctatctttcttgacaaagagtgattagaaatatgcaatgtattttcattcttaaaagttctatgctaggtggctcatatattaagtcttaaataattacaaattgataaaaaaaatcagtcaataaaaattacttacgcattctggaatttgtactctccaagctgctcaaaaagctcacaattttgtttgattaaattctgaggctcttccacaagaggtttaaattcatcgaactgaaacataaaagaattgtgttaatagtattatgcctcaggatcagatgcaggttgtttttcacccctctggtcagaatgatatcctttcttcttcctactcaaagccacatgaatagatgaatatcaatgccgctctgtcacaatacattcgaactatttatttggtgagcttgcatcatgtaagtggttaagaatattcaggctctggagttcaatgaccagtatttgagccaagtcatgtaactcattcttcagttgtgcaattttacttaccatctccacatttcagaatccttatccctaaaataggggcaaagatggcactcatctcatagagctgctctgtaaaccaggtaagctaatgaaattaaacagtgccttgcatataataaaagtttaataaatgatggctatgattgtacatattattattattagttcacctttccagttagattccaggctctccaaaatgagagattttacgttggtcattgtttgtgcatggtgcctggcatacagtagcttcttgaaagcaggaaaaatgagttttctctgattctgaatagttcagaaaccattacatatgctagtgggaaccctaaaaatcctccagaacagatttcctctcctaacttaatttcttgtaaaactattcctaaacatcctcaaaaagatttgaaaatattctaaagggataggttctataatttgccataagatactaattctagtacttgattaatcctggaatcaggttaactcactttacatctaagttaaatatcttctaattaacatttaaatttaatttttttttgttctcaggattgtgaaaaagagaaaaaaagatcaaaattttttagagattgctctattcagatctttctattctaactagtctaaattttc

SEQ ID NO: 1841 - DNA, 2266 bp, synthetic construct
  source 1..2266: mol_type = other DNA
gtttcttgagacctctacaagagttggagttgacacttggggtactttcttggtgtaacgaactaatagcctgaaaaaaagaagtcatgtgttttcagcaaggcaagaaactgtctaacatagtagataaaacagagaacacttggccggaatcaactaagatgttgctatgttccattcatcatattatctccatctgcagagtagtgggttagtggagggtagaaaacattctcctgaacaactagttaaacttggctttgagttccacctgtaccacttgcataatcttgggaaagtgagttgcctaattcagtgacattaataaatttattaatttcttctttcaataaaacctggagagagcttcatatgtatcagcatatgctaaacttgaaagatacaagtagaaaatggaaggaaatatatctgactcaatagggatagttcaagggttaaattaaaagtagtaaagtattataattaatctgacatggtacctaatatataataatcatgtattaagaatgccagtcaccattaaaagtcaatgtatgactttaatctactcgaggaaagaaactatgtcttgttcactgttattatctctaaaatccataatcagaagagcaccatgtgtatgagccacacaataaatatctactgtataatatgtctcttcttgtttttaaccttcatagataagactctattgaattgggacattagtccagcaagccattctgtctctgtctcttctatggagggaaaggtttaaccatcaaagactaggtgcatctcccaaacaacctgaatttaatattcaaatatgtatctaaattcatttgttacatttttgtgttcagcttacatattactttttgagcgacatctattcaaggcctactacttgctgctctacaaaatattgccatgctctatttgcccattaactatttcttaaccttcaagggacatgctcagttctgatataccaagatttggtatttaccctcccagcctacatacttccaatcttaagagaacaatttttagactacattcaaatatagacctctccaccccatcaactattttatctctcctctcctatctttcttgacaaagagtgattagaaatatgcaatgtattttcattcttaaaagttctatgctaggtggctcatatattaagtcttaaataattacaaattgataaaaaaaatcagtcaataaaaattacttacgcattctggaatttgtactctccaagctgctcaaaaagctcacaattttgtttgattaaattctgaggctcttccacaagaggtttaaattcatcgaactgaaacataaaagaattgtgttaatagtattatgcctcaggatcagatgcaggttgtttttcacccctctggtcagaatgatatcctttcttcttcctactcaaagccacatgaatagatgaatatcaatgccgctctgtcacaatacattcgaactatttatttggtgagcttgcatcatgtaagtggttaagaatattcaggctctggagttcaatgaccagtatttgagccaagtcatgtaactcattcttcagttgtgcaattttacttaccatctccacatttcagaatccttatccctaaaataggggcaaagatggcactcatctcatagagctgctctgtaaaccaggtaagctaatgaaattaaacagtgccttgcatataataaaagtttaataaatgatggctatgattgtacatattattattattagttcacctttccagttagattccaggctctccaaaatgagagattttacgttggtcattgtttgtgcatggtgcctggcatacagtagcttcttgaaagcaggaaaaatgagttttctctgattctgaatagttcagaaaccattacatatgctagtgggaaccctaaaaatcctccagaacagatttcctctcctaacttaatttcttgtaaaactattcctaaacatcctcaaaaagatttgaaaatattctaaagggataggttctataatttgccataagatactaattctagtacttgattaatcctggaatcaggttaactcactttacatctaagttaaatatcttctaattaacatttaaatttaatttttttttgttctcaggattgtgaaaaagagaaaaaaagatcaaaattttttagagattgctctattcagatctttctattctaactagtctaaattttgtcctag

SEQ ID NO: 1842 - protein, 13 aa, synthetic construct
GNGSPHSKAQNKQ

SEQ ID NO: 1843 - protein, 13 aa, synthetic construct
GSGSPHSKGHWQQ

SEQ ID NO: 1844 - protein, 13 aa, synthetic construct
GSGSPHSKAPNQQ

SEQ ID NO: 1845 - protein, 13 aa, synthetic construct
GSGSPHSKAQNQL

SEQ ID NO: 1846 - protein, 13 aa, synthetic construct
GSGSPHSKRPEQQ

SEQ ID NO: 1847 - protein, 13 aa, synthetic construct
GSGSPHSKAQRTM

SEQ ID NO: 1848 - protein, 13 aa, synthetic construct
GNGSPHSKAQNQH

SEQ ID NO: 1849 - protein, 13 aa, synthetic construct
HSGSPHSKAQNQQ

SEQ ID NO: 1850 - protein, 13 aa, synthetic construct
GGGSPHSKALNQQ

SEQ ID NO: 1851 - protein, 13 aa, synthetic construct
GSGSPHSKALHQH

SEQ ID NO: 1852 - protein, 13 aa, synthetic construct
GTGSPHSKAQNHQ

SEQ ID NO: 1853 - protein, 13 aa, synthetic construct
GSGSPHSKAQHRI

SEQ ID NO: 1854 - protein, 13 aa, synthetic construct
GSGSPHSKAQYIH

SEQ ID NO: 1855 - protein, 13 aa, synthetic construct
GGGSPHSKAHNQQ

SEQ ID NO: 1856 - protein, 13 aa, synthetic construct
GSGSPHSKAQKFE

SEQ ID NO: 1857 - protein, 13 aa, synthetic construct
ESGSPHSKAQNHQ

SEQ ID NO: 1858 - protein, 13 aa, synthetic construct
GSGSPHSKAQFPS

SEQ ID NO: 1859 - protein, 13 aa, synthetic construct
PSGSPHSKAQNQQ

SEQ ID NO: 1860 - protein, 13 aa, synthetic construct
GNGSPHSKAQNPL

SEQ ID NO: 1861 - protein, 13 aa, synthetic construct
GGGSPHSKAQSQQ

SEQ ID NO: 1862 - protein, 13 aa, synthetic construct
GSGSPHSKAQAIK

SEQ ID NO: 1863 - protein, 13 aa, synthetic construct
GSGSPHSKGQNRQ

SEQ ID NO: 1864 - protein, 13 aa, synthetic construct
GSGSPHSKAQSQQ

SEQ ID NO: 1865 - protein, 13 aa, synthetic construct
GSVSPHGKAQNQL

SEQ ID NO: 1866 - protein, 13 aa, synthetic construct
ASGSPHSKAQNQL

SEQ ID NO: 1867 - protein, 13 aa, synthetic construct
RSGSPHSKAQNQQ

SEQ ID NO: 1868 - protein, 13 aa, synthetic construct
GSGSPHSKAQYQH

SEQ ID NO: 1869 - protein, 13 aa, synthetic construct
GSGSPHTKAQNPQ

SEQ ID NO: 1870 - protein, 13 aa, synthetic construct
GSGSPHSKGQNPP

SEQ ID NO: 1871 - protein, 13 aa, synthetic construct
GSGSPHSKAQHQL

SEQ ID NO: 1872 - protein, 13 aa, synthetic construct
GSGSPHSKAQSPP

SEQ ID NO: 1873 - protein, 13 aa, synthetic construct
GSGSPHSKAQAKL

SEQ ID NO: 1874 - protein, 13 aa, synthetic construct
GSGSPHSKTKSQQ

SEQ ID NO: 1875 - protein, 13 aa, synthetic construct
GSGSPHSKAQDRP

SEQ ID NO: 1876 - protein, 13 aa, synthetic construct
GIGSPHSKAQNLG

SEQ ID NO: 1877 - protein, 13 aa, synthetic construct
GSGSPHSKAQAFH

SEQ ID NO: 1878 - protein, 13 aa, synthetic construct
GSGSPHSKAQKQQ

SEQ ID NO: 1879 - protein, 13 aa, synthetic construct
GSGSPHSKAQNAQ

SEQ ID NO: 1880 - protein, 13 aa, synthetic construct
WSGSPHSKAQNQQ

SEQ ID NO: 1881 - protein, 13 aa, synthetic construct
GSGSPHSKAHNQL

SEQ ID NO: 1882 - protein, 13 aa, synthetic construct
GNGSPHSKAQNHQ

SEQ ID NO: 1883 - protein, 13 aa, synthetic construct
GGGSPHSKAQNLQ

SEQ ID NO: 1884 - protein, 13 aa, synthetic construct
GSGSPHSKAQKLN

SEQ ID NO: 1885 - protein, 13 aa, synthetic construct
GGGSPHSKSQNQH

SEQ ID NO: 1886 - protein, 13 aa, synthetic construct
GSGSPHSKSQNVQ

SEQ ID NO: 1887 - protein, 13 aa, synthetic construct
GSGSPHSKAQAQQ

SEQ ID NO: 1888 - protein, 13 aa, synthetic construct
DSGSPHSKAQNQQ

SEQ ID NO: 1889 - protein, 13 aa, synthetic construct
ASGSPHSKAPNQQ

SEQ ID NO: 1890 - protein, 13 aa, synthetic construct
GSGSPHSKAQTPP

SEQ ID NO: 1891 - protein, 13 aa, synthetic construct
IDGSPHSKAQNQQ

SEQ ID NO: 1892 - protein, 13 aa, synthetic construct
GSGSPHNKAQNHQ

SEQ ID NO: 1893 - protein, 13 aa, synthetic construct
GSGSPHSKAQPPA

SEQ ID NO: 1894 - protein, 13 aa, synthetic construct
GSGSPHSKAQERP

SEQ ID NO: 1895 - protein, 13 aa, synthetic construct
GSGSPHSKAQDLQ

SEQ ID NO: 1896 - protein, 13 aa, synthetic construct
GGGSPHSKAQNPP

SEQ ID NO: 1897 - protein, 13 aa, synthetic construct
GSGSPHSKAQAMH

SEQ ID NO: 1898 - protein, 13 aa, synthetic construct
GSGSPHSKALNQQ

SEQ ID NO: 1899 - protein, 13 aa, synthetic construct
GSGSPHSKAQHPS

SEQ ID NO: 1900 - protein, 13 aa, synthetic construct
GLGSPHSKSQNQQ

SEQ ID NO: 1901 - protein, 13 aa, synthetic construct
GTGSPHSKAQNQQ

SEQ ID NO: 1902 - protein, 13 aa, synthetic construct
GSGSPHSKAPGLQ

SEQ ID NO: 1903 - protein, 13 aa, synthetic construct
GSGSPHSKAQGIR

SEQ ID NO: 1904 - protein, 13 aa, synthetic construct
GSGSPHSKAQAPA

SEQ ID NO: 1905 - protein, 13 aa, synthetic construct
GSGSPHSKSQSQQ

SEQ ID NO: 1906 - protein, 13 aa, synthetic construct
GSGSPHSKAQIPP

SEQ ID NO: 1907 - protein, 13 aa, synthetic construct
GSGSPHSKAQTQL

SEQ ID NO: 1908 - protein, 13 aa, synthetic construct
GSGSPHSKAQAPS

SEQ ID NO: 1909 - protein, 13 aa, synthetic construct
DAGSPHSKAQNQQ

SEQ ID NO: 1910 - protein, 13 aa, synthetic construct
GSGSPHSKGQNQQ

SEQ ID NO: 1911 - protein, 13 aa, synthetic construct
DGGSPHSKAQNQQ

SEQ ID NO: 1912 - protein, 13 aa, synthetic construct
ASGSPHSKAHNQQ

SEQ ID NO: 1913 - protein, 13 aa, synthetic construct
GSGSPHSKAQNTY

SEQ ID NO: 1914 - protein, 13 aa, synthetic construct
GSGSPHSKSQNQH

SEQ ID NO: 1915 - protein, 13 aa, synthetic construct
GGGSPHSKAQDKQ

SEQ ID NO: 1916 - protein, 13 aa, synthetic construct
GSGSPHSKAQNHL

SEQ ID NO: 1917 - protein, 13 aa, synthetic construct
GSGSPHSKAQIGM

SEQ ID NO: 1918 - protein, 13 aa, synthetic construct
GSGSPHSKALNKQ

SEQ ID NO: 1919 - protein, 13 aa, synthetic construct
GGGSPHSKAQNPQ

SEQ ID NO: 1920 - protein, 13 aa, synthetic construct
GTGSPHSKAPNQL

SEQ ID NO: 1921 - protein, 13 aa, synthetic construct
GSGSPHSKAQLQQ

SEQ ID NO: 1922 - protein, 13 aa, synthetic construct
GGGSPHSKAQYQQ

SEQ ID NO: 1923 - protein, 13 aa, synthetic construct
GGGSPHSKAQHQQ

SEQ ID NO: 1924 - protein, 13 aa, synthetic construct
GSGSPHSKAQRMS

SEQ ID NO: 1925 - protein, 13 aa, synthetic construct
GSGSPHSKAQGIL

SEQ ID NO: 1926 - protein, 13 aa, synthetic construct
GSGSPHSKAQDRQ

SEQ ID NO: 1927 - protein, 13 aa, synthetic construct
GSGSPHSKARDWQ

SEQ ID NO: 1928 - protein, 13 aa, synthetic construct
GSGSPHSKAQNTH

SEQ ID NO: 1929 - protein, 13 aa, synthetic construct
GSGSPHSKAQERS

SEQ ID NO: 1930 - protein, 13 aa, synthetic construct
GSGSPHSKAQNYQ

SEQ ID NO: 1931 - protein, 13 aa, synthetic construct
GSGSPHSKAQRTC

SEQ ID NO: 1932 - protein, 13 aa, synthetic construct
GSGSPHSKAQIGH

SEQ ID NO: 1933 - protein, 13 aa, synthetic construct
GSGSPHSKAQGAI

SEQ ID NO: 1934 - protein, 13 aa, synthetic construct
GSGSPHSKAQVPP

SEQ ID NO: 1935 - protein, 13 aa, synthetic construct
GSGSPHSKAQVQQ

SEQ ID NO: 1936 - protein, 13 aa, synthetic construct
GSGSPHSKALMRQ

SEQ ID NO: 1937 - protein, 13 aa, synthetic construct
GSGSPHSKAQYSV

SEQ ID NO: 1938 - protein, 13 aa, synthetic construct
GSGSPHSKVPNLQ

SEQ ID NO: 1939 - protein, 13 aa, synthetic construct
GSGSPHSKAQAIT

SEQ ID NO: 1940 - protein, 13 aa, synthetic construct
GSGSPHSKAQKTL

SEQ ID NO: 1941 - protein, 13 aa, synthetic construct
GSGSPHSKAQNQW

SEQ ID NO: 1942 - protein, 13 aa, synthetic construct
GSGSPHSKAQLHH

SEQ ID NO: 1943 - protein, 13 aa, synthetic construct
GSGSPHSKAQNII

SEQ ID NO: 1944 - protein, 13 aa, synthetic construct
MEGSPHSKAQNQQ

SEQ ID NO: 1945 - protein, 13 aa, synthetic construct
GSGSPHSKAQGHH

SEQ ID NO: 1946 - protein, 13 aa, synthetic construct
GSGSPHSKAQSKV

SEQ ID NO: 1947 - protein, 13 aa, synthetic construct
GSGSPHSKAQLPS

SEQ ID NO: 1948 - protein, 13 aa, synthetic construct
GSGSPHSKAIGKQ

SEQ ID NO: 1949 - protein, 13 aa, synthetic construct
GGGSPHSKSQNQQ

SEQ ID NO: 1950 - protein, 13 aa, synthetic construct
GSGSPHSKAQAIH

SEQ ID NO: 1951 - protein, 13 aa, synthetic construct
GSGSPHSKAQHGL

SEQ ID NO: 1952 - protein, 13 aa, synthetic construct
GSGSPHSKAQFMC

SEQ ID NO: 1953 - protein, 13 aa, synthetic construct
VSGSPHSKAQGQQ

SEQ ID NO: 1954 - protein, 13 aa, synthetic construct
GGGSPHSKAQNQM

SEQ ID NO: 1955 - protein, 13 aa, synthetic construct
GSGSPHSKAQHLQ

SEQ ID NO: 1956 - protein, 13 aa, synthetic construct
ENGSPHSKAQNQQ

SEQ ID NO: 1957 - protein, 13 aa, synthetic construct
GSGSPHSKTQNHQ

SEQ ID NO: 1958 - protein, 13 aa, synthetic construct
GSGSPHSKAQPAR

SEQ ID NO: 1959 - protein, 13 aa, synthetic construct
GSGSPHSKAQSLQ

SEQ ID NO: 1960 - protein, 13 aa, synthetic construct
GSGSPHSKSQSQL

SEQ ID NO: 1961 - protein, 13 aa, synthetic construct
GSASPHSKAHSQQ

SEQ ID NO: 1962 - protein, 13 aa, synthetic construct
GSGSPHSKAQMPS

SEQ ID NO: 1963 - protein, 13 aa, synthetic construct
GSGSPHSKAQGSL

SEQ ID NO: 1964 - protein, 13 aa, synthetic construct
GSGSPHSKSQNQQ

SEQ ID NO: 1965 - protein, 13 aa, synthetic construct
GNGSPHSKSQNQQ

SEQ ID NO: 1966 - protein, 13 aa, synthetic construct
GSGSPHSKAQVPA

SEQ ID NO: 1967 - protein, 13 aa, synthetic construct
GNGSPHSKAQNLQ

SEQ ID NO: 1968 - protein, 13 aa, synthetic construct
GSGSPHSKAQDKQ

SEQ ID NO: 1969 - protein, 13 aa, synthetic construct
GSGSPHSKAHYQQ

SEQ ID NO: 1970 - protein, 13 aa, synthetic construct
GSGSPHSKAQVPS

SEQ ID NO: 1971 - protein, 13 aa, synthetic construct
GGGSPHSKAQNHQ

SEQ ID NO: 1972 - protein, 13 aa, synthetic construct
GSGSPHSKARGEQ

SEQ ID NO: 1973 - protein, 13 aa, synthetic construct
GGGSPHSKAQYQH

SEQ ID NO: 1974 - protein, 13 aa, synthetic construct
GSGSPHSKAPGQQ

SEQ ID NO: 1975 - protein, 13 aa, synthetic construct
KNGSPHSKAQNQQ

SEQ ID NO: 1976 - protein, 13 aa, synthetic construct
GSGSPHSKRLEQQ

SEQ ID NO: 1977 - protein, 13 aa, synthetic construct
GSGSPHSKAQNQS

SEQ ID NO: 1978 - protein, 13 aa, synthetic construct
GSGSPHSKAQKVI

SEQ ID NO: 1979 - protein, 13 aa, synthetic construct
GSGSPHSKAQNND

SEQ ID NO: 1980 - protein, 13 aa, synthetic construct
GSGSPHSKAQSVH

SEQ ID NO: 1981 - protein, 13 aa, synthetic construct
GSGSPHSKAQPLG

SEQ ID NO: 1982 - protein, 13 aa, synthetic construct
KEGSPHSKAQNQQ

SEQ ID NO: 1983 - protein, 13 aa, synthetic construct
GSGSPHSKAHNQE

SEQ ID NO: 1984 - protein, 13 aa, synthetic construct
GSGSPHSKAQIQQ

SEQ ID NO: 1985 - protein, 13 aa, synthetic construct
GSGSPHSKAQVRN

SEQ ID NO: 1986 - protein, 13 aa, synthetic construct
GSGSPHSKAPSNQ

SEQ ID NO: 1987 - protein, 13 aa, synthetic construct
GSGSPHSKAQVGH

SEQ ID NO: 1988 - protein, 13 aa, synthetic construct
GSGSPHSKAQRDI

SEQ ID NO: 1989 - protein, 13 aa, synthetic construct
GSGSPHSKAQMPN

SEQ ID NO: 1990 - protein, 13 aa, synthetic construct
AIGSPHSKAQNQQ

SEQ ID NO: 1991 - protein, 13 aa, synthetic construct
GSGSPHSKARGLQ

SEQ ID NO: 1992 - protein, 13 aa, synthetic construct
GSGSPHSKLQKQQ

SEQ ID NO: 1993 - protein, 13 aa, synthetic construct
GSGSPHSKAPSLQ

SEQ ID NO: 1994 - protein, 13 aa, synthetic construct
GSGSPHSKAQRDQ

SEQ ID NO: 1995 - protein, 13 aa, synthetic construct
GSGSPHSKNRDQQ

SEQ ID NO: 1996 - protein, 13 aa, synthetic construct
GSGSPHSKAQAKG

SEQ ID NO: 1997 - protein, 13 aa, synthetic construct
GSGSPHSKAQSAH

SEQ ID NO: 1998 - protein, 13 aa, synthetic construct
GNGSPHSKSQNQH

SEQ ID NO: 1999 - protein, 13 aa, synthetic construct
GSGSPHSKSQNHQ

SEQ ID NO: 2000 - protein, 13 aa, synthetic construct
RSGSPHSKAQDQQ

SEQ ID NO: 2001 - protein, 13 aa, synthetic construct
GSGSPHSKAQSTM

SEQ ID NO: 2002 - protein, 13 aa, synthetic construct
GSGSPHSKAQREM

SEQ ID NO: 2003 - protein, 13 aa, synthetic construct
GGGSPHSKSQNRQ

SEQ ID NO: 2004 - protein, 13 aa, synthetic construct
GSGSPHSKAQYRA

SEQ ID NO: 2005 - protein, 13 aa, synthetic construct
GGGSPHSKAQRQQ

SEQ ID NO: 2006 - protein, 13 aa, synthetic construct
GSGSPHSKNQWQQ

SEQ ID NO: 2007 - protein, 13 aa, synthetic construct
GSGSPHSKAQRMN

SEQ ID NO: 2008 - protein, 13 aa, synthetic construct
GSGSPHAKAQNHQ

SEQ ID NO: 2009 - protein, 13 aa, synthetic construct
GSGSPHSKAGDSQ

SEQ ID NO: 2010 - protein, 13 aa, synthetic construct
GSGSPHSKLKSQQ

SEQ ID NO: 2011 - protein, 13 aa, synthetic construct
GSGSPHSKAQKIS

SEQ ID NO: 2012 - protein, 13 aa, synthetic construct
GSGSPHSKAPSMQ

SEQ ID NO: 2013 - protein, 13 aa, synthetic construct
GSGSPHSKASPRQ

SEQ ID NO: 2014 - protein, 13 aa, synthetic construct
GSGSPHSKRMEQQ

SEQ ID NO: 2015 - protein, 13 aa, synthetic construct
GSGSPHSKAQYQN

SEQ ID NO: 2016 - protein, 13 aa, synthetic construct
GSGSPHARMQNQQ

SEQ ID NO: 2017 - protein, 13 aa, synthetic construct
GSGSPHVKSQNQQ

SEQ ID NO: 2018 - protein, 13 aa, synthetic construct
GQDSPHKSGQNQQ

SEQ ID NO: 2019 - protein, 13 aa, synthetic construct
GSGSPHASRQNQQ

SEQ ID NO: 2020 - protein, 13 aa, synthetic construct
GSGSPHASRQNKQ

SEQ ID NO: 2021 - protein, 13 aa, synthetic construct
GSGSPHVKIQNQQ

SEQ ID NO: 2022 - protein, 13 aa, synthetic construct
GSGSPHSKAKNQQ

SEQ ID NO: 2023 - protein, 13 aa, synthetic construct
GSGSPHKKNQNQQ

SEQ ID NO: 2024 - protein, 13 aa, synthetic construct
GSGSPHVRMQNQQ

SEQ ID NO: 2025 - protein, 13 aa, synthetic construct
GSGSPHASRQKQQ

SEQ ID NO: 2026 - protein, 13 aa, synthetic construct
GHSSPHRSGQNQQ

SEQ ID NO: 2027 - protein, 13 aa, synthetic construct
GSGSPHTRGQNQQ

SEQ ID NO: 2028 - protein, 13 aa, synthetic construct
CSGSPHSKAQNQQ

SEQ ID NO: 2029 - protein, 13 aa, synthetic construct
GSGSPHRKAQNQQ

SEQ ID NO: 2030 - protein, 13 aa, synthetic construct
GSGSPHSKAQNKQ

SEQ ID NO: 2031 - protein, 13 aa, synthetic construct
GSGSPHSKAQTQQ

SEQ ID NO: 2032 - protein, 13 aa, synthetic construct
CSGSPHKTSQNQQ

SEQ ID NO: 2033 - protein, 13 aa, synthetic construct
CSHSPHKSGQNQQ

SEQ ID NO: 2034 - protein, 13 aa, synthetic construct
GQSSPHRSGQNQQ

SEQ ID NO: 2035 - protein, 13 aa, synthetic construct
GRGSPHASRQNQQ

SEQ ID NO: 2036 - protein, 13 aa, synthetic construct
GSGSPHASRKNQQ

SEQ ID NO: 2037 - protein, 13 aa, synthetic construct
GSGSPHASRQNQH

SEQ ID NO: 2038 - protein, 13 aa, synthetic construct
GSGSPHKFGKNQQ

SEQ ID NO: 2039 - protein, 13 aa, synthetic construct
GSGSPHKFGQKQQ

SEQ ID NO: 2040 - protein, 13 aa, synthetic construct
GSGSPHKFGQNQQ

SEQ ID NO: 2041 - protein, 13 aa, synthetic construct
GSGSPHKIGQNQQ

SEQ ID NO: 2042 - protein, 13 aa, synthetic construct
GSGSPHKLGQNQQ

SEQ ID NO: 2043 - protein, 13 aa, synthetic construct
GSGSPHKTSKNQQ

SEQ ID NO: 2044 - protein, 13 aa, synthetic construct
GSGSPHKTSQKQQ

SEQ ID NO: 2045 - protein, 13 aa, synthetic construct
GSGSPHKTSQNQQ

SEQ ID NO: 2046 - protein, 13 aa, synthetic construct
GSGSPHKTTQNQQ

SEQ ID NO: 2047 - protein, 13 aa, synthetic construct
GSGSPHKTYQNQQ

SEQ ID NO: 2048 - protein, 13 aa, synthetic construct
GSGSPHKYGQNQQ

SEQ ID NO: 2049 - protein, 13 aa, synthetic construct
GSGSPHSKAQHQQ

SEQ ID NO: 2050 - protein, 13 aa, synthetic construct
GSGSPHSKDQNQQ

SEQ ID NO: 2051 - protein, 13 aa, synthetic construct
GSGSPHSKPQNQQ

SEQ ID NO: 2052 - protein, 13 aa, synthetic construct
GSGSPHVRGQKQQ

SEQ ID NO: 2053 - protein, 13 aa, synthetic construct
GSGSPHVRGQNKQ

SEQ ID NO: 2054 - protein, 13 aa, synthetic construct
GSHSPHKRGQNQQ

SEQ ID NO: 2055 - protein, 13 aa, synthetic construct
GSHSPHKSGQKQQ

SEQ ID NO: 2056 - protein, 13 aa, synthetic construct
GSHSPHKSGQNQQ

SEQ ID NO: 2057 - protein, 13 aa, synthetic construct
VSGSPHASRQNQQ

SEQ ID NO: 2058 - protein, 13 aa, synthetic construct
VSGSPHGARQNQQ

SEQ ID NO: 2059 - protein, 13 aa, synthetic construct
VSGSPHKFGQNQQ

SEQ ID NO: 2060 - protein, 13 aa, synthetic construct
GSGSPHSKAQYYV

SEQ ID NO: 2061 - protein, 13 aa, synthetic construct
GSGSPHSKLRRQQ

SEQ ID NO: 2062 - protein, 13 aa, synthetic construct
GSGSPHSKAGCGQ

SEQ ID NO: 2063 - protein, 13 aa, synthetic construct
GSGSPHSRAQNQQ

SEQ ID NO: 2064 - protein, 13 aa, synthetic construct
GSGSPHSKRLRQQ

SEQ ID NO: 2065 - protein, 13 aa, synthetic construct
GSGSPHSLRRNQQ

SEQ ID NO: 2066 - protein, 13 aa, synthetic construct
GSGSPHSRGRNQQ

SEQ ID NO: 2067 - protein, 13 aa, synthetic construct
GSGSPHSSRRNQQ

SEQ ID NO: 2068 - protein, 13 aa, synthetic construct
GSGSPHSKAFRLQ

SEQ ID NO: 2069 - protein, 13 aa, synthetic construct
GSCSPHRKAQNQQ

SEQ ID NO: 2070 - protein, 13 aa, synthetic construct
GSGSPHFLRQNQQ

SEQ ID NO: 2071 - protein, 13 aa, synthetic construct
GSGSPHSLRFNQQ

SEQ ID NO: 2072 - protein, 13 aa, synthetic construct
GSGSPHSKWLLQQ

SEQ ID NO: 2073 - protein, 13 aa, synthetic construct
GSGSPHSKRRLQQ

SEQ ID NO: 2074 - protein, 13 aa, synthetic construct
GSGSPHSKAQRKL

SEQ ID NO: 2075 - protein, 13 aa, synthetic construct
GSGSPHSKALRRQ

SEQ ID NO: 2076 - protein, 13 aa, synthetic construct
GSGSPHSKAQRLR

SEQ ID NO: 2077 - protein, 13 aa, synthetic construct
GSGSPHSKAQRRL

SEQ ID NO: 2078 - protein, 13 aa, synthetic construct
GSGSPHSKARRQQ

SEQ ID NO: 2079 - protein, 13 aa, synthetic construct
GSGSPHSKARRLQ

SEQ ID NO: 2080 - protein, 13 aa, synthetic construct
GSGSPHSKSRRQQ

SEQ ID NO: 2081 - protein, 13 aa, synthetic construct
GLLSPHWKAQNQQ

SEQ ID NO: 2082 - protein, 13 aa, synthetic construct
GSGSPHSKARLRQ

SEQ ID NO: 2083 - protein, 13 aa, synthetic construct
GSGSPHSKASKRQ

SEQ ID NO: 2084 - protein, 13 aa, synthetic construct
GSGSPHVRRQNQQ

SEQ ID NO: 2085 - protein, 13 aa, synthetic construct
GSGSPHSKAQLYR

SEQ ID NO: 2086 - protein, 13 aa, synthetic construct
GSGSPHSKAQLTV

SEQ ID NO: 2087 - protein, 13 aa, synthetic construct
GHDSPHKRGQHRQ

SEQ ID NO: 2088 - protein, 13 aa, synthetic construct
GHDSPHKSGQKQQ

SEQ ID NO: 2089 - protein, 13 aa, synthetic construct
GHDSPHKSGLTQQ

SEQ ID NO: 2090 - protein, 13 aa, synthetic construct
GDDSPHKSGRNQQ

SEQ ID NO: 2091 - protein, 13 aa, synthetic construct
GHDSPHKSGLNQQ

SEQ ID NO: 2092 - protein, 13 aa, synthetic construct
GHESPHKSAQNHQ

SEQ ID NO: 2093 - protein, 13 aa, synthetic construct
GHDSPHKSAQNQW

SEQ ID NO: 2094 - protein, 13 aa, synthetic construct
GHDSPHKSGQNTH

SEQ ID NO: 2095 - protein, 13 aa, synthetic construct
GHDSPHKSGRRRQ

SEQ ID NO: 2096 - protein, 13 aa, synthetic construct
GHDSPHKSAQNQQ

SEQ ID NO: 2097 - protein, 13 aa, synthetic construct
GHDSPHKSGQYQQ

SEQ ID NO: 2098 - protein, 13 aa, synthetic construct
GNYSPHKIGQNQQ

SEQ ID NO: 2099 - protein, 13 aa, synthetic construct
GHDSPHKSRQNDQ

SEQ ID NO: 2100 - protein, 13 aa, synthetic construct
GHDSPHKSGQIRQ

SEQ ID NO: 2101 - protein, 13 aa, synthetic construct
GHDSPHKIGQNQH

SEQ ID NO: 2102 - protein, 13 aa, synthetic construct
GYDSPHKSGQKQQ

SEQ ID NO: 2103 - protein, 13 aa, synthetic construct
GHDSPHKSGQSVQ

SEQ ID NO: 2104 - protein, 13 aa, synthetic construct
GHESPHKSGRSQQ

SEQ ID NO: 2105 - protein, 13 aa, synthetic construct
GHDSPHKSGQNKL

SEQ ID NO: 2106 - protein, 13 aa, synthetic construct
GHDSPHKTGQNQQ

SEQ ID NO: 2107 - protein, 13 aa, synthetic construct
GRGSPHKRGQNQQ

SEQ ID NO: 2108 - protein, 13 aa, synthetic construct
GSGSPHTKAQNPP

SEQ ID NO: 2109 - protein, 13 aa, synthetic construct
GQDSPHKSGQHQQ

SEQ ID NO: 2110 - protein, 13 aa, synthetic construct
GHDSPHKSGQIQH

SEQ ID NO: 2111 - protein, 13 aa, synthetic construct
GHDSPHKSGPRQQ

SEQ ID NO: 2112 - protein, 13 aa, synthetic construct
GHDSPHKSGHTQQ

SEQ ID NO: 2113 - protein, 13 aa, synthetic construct
GHDSPHKSGQRQH

SEQ ID NO: 2114 - protein, 13 aa, synthetic construct
GSGSPHTKAQNQQ

SEQ ID NO: 2115 - protein, 13 aa, synthetic construct
GHDSPHKSAQSQQ

SEQ ID NO: 2116 - protein, 13 aa, synthetic construct
GHESPHKSGQNQQ

SEQ ID NO: 2117 - protein, 13 aa, synthetic construct
GHDSPHKSLQNQQ

SEQ ID NO: 2118 - protein, 13 aa, synthetic construct
GHGSPHSKAQNPQ

SEQ ID NO: 2119 - protein, 13 aa, synthetic construct
GHDSPHKSGRNQE

SEQ ID NO: 2120 - protein, 13 aa, synthetic construct
GHDSPHKSGQTQL

SEQ ID NO: 2121 - protein, 13 aa, synthetic construct
GHDSPHKSEKNQQ

SEQ ID NO: 2122 - protein, 13 aa, synthetic construct
GRDSPHKSGQDQQ

SEQ ID NO: 2123 - protein, 13 aa, synthetic construct
GHDSPHKTGHNQQ

SEQ ID NO: 2124 - protein, 13 aa, synthetic construct
GYDSPHKSGQTQQ

SEQ ID NO: 2125 - protein, 13 aa, synthetic construct
GHESPHKSGQTQQ

SEQ ID NO: 2126 - protein, 13 aa, synthetic construct
GHDSPHKSGQSKQ

SEQ ID NO: 2127 - protein, 13 aa, synthetic construct
GHDSPHKTGQNQP

SEQ ID NO: 2128 - protein, 13 aa, synthetic construct
GHDSPHKSGQSPQ

SEQ ID NO: 2129 - protein, 13 aa, synthetic construct
GNDSPHKSVQNQQ

SEQ ID NO: 2130 - protein, 13 aa, synthetic construct
GHDSPHKSAQNYQ

SEQ ID NO: 2131 - protein, 13 aa, synthetic construct
GSASPHSKALNQQ

SEQ ID NO: 2132 - protein, 13 aa, synthetic construct
GHESPHKSAQNRQ

SEQ ID NO: 2133 - protein, 13 aa, synthetic construct
GQDSPHKIGQNQQ

SEQ ID NO: 2134 - protein, 13 aa, synthetic construct
GHDSPHKSGQNHL

SEQ ID NO: 2135 - protein, 13 aa, synthetic construct
GHDSPHKSGQYQH

SEQ ID NO: 2136 - protein, 13 aa, synthetic construct
GNDSPHKSVQNHQ

SEQ ID NO: 2137 - protein, 13 aa, synthetic construct
GHDSPHKSGQNQW

SEQ ID NO: 2138 - protein, 13 aa, synthetic construct
GHDSPHKSVQNQH

SEQ ID NO: 2139 - protein, 13 aa, synthetic construct
GHDSPHKSGQNQH

SEQ ID NO: 2140 - protein, 13 aa, synthetic construct
GHDSPHKSGQTRQ

SEQ ID NO: 2141 - protein, 13 aa, synthetic construct
GHDSPHKSGQNLH

SEQ ID NO: 2142 - protein, 13 aa, synthetic construct
GHDSPHKSAQNQE

SEQ ID NO: 2143 - protein, 13 aa, synthetic construct
GHDSPHKSGQHLQ

SEQ ID NO: 2144 - protein, 13 aa, synthetic construct
GHDSPHKSRLNQP

SEQ ID NO: 2145 - protein, 13 aa, synthetic construct
GQDSPHKSGQNQD

SEQ ID NO: 2146 - protein, 13 aa, synthetic construct
GHDSPHKSGRNQQ

SEQ ID NO: 2147 - protein, 13 aa, synthetic construct
GHDSPHKSGQNLL

SEQ ID NO: 2148 - protein, 13 aa, synthetic construct
GHDSPHKSGQLVI

SEQ ID NO: 2149 - protein, 13 aa, synthetic construct
GHDSPHKSRQSQQ

SEQ ID NO: 2150 - protein, 13 aa, synthetic construct
GHDSPHKSGRTQE

SEQ ID NO: 2151 - protein, 13 aa, synthetic construct
GHDSPHKSVQTHQ

SEQ ID NO: 2152 - protein, 13 aa, synthetic construct
GHDSPHKSGQNQP

SEQ ID NO: 2153 - protein, 13 aa, synthetic construct
GHDSPHKSGQTQQ

SEQ ID NO: 2154 - protein, 13 aa, synthetic construct
GPDSPHKIGQNQQ

SEQ ID NO: 2155 - protein, 13 aa, synthetic construct
GHDSPHKSVQNQQ

SEQ ID NO: 2156 - protein, 13 aa, synthetic construct
GHDSPHKSRQDQH

SEQ ID NO: 2157 - protein, 13 aa, synthetic construct
GPDSPHKSGQKQQ

SEQ ID NO: 2158 - protein, 13 aa, synthetic construct
GHDSPHKSRQSQH

SEQ ID NO: 2159 - protein, 13 aa, synthetic construct
GHDSPHKSVQNQL

SEQ ID NO: 2160 - protein, 13 aa, synthetic construct
GYDSPHKSGQYQH

SEQ ID NO: 2161 - protein, 13 aa, synthetic construct
GHDSPHKSRQNQQ

SEQ ID NO: 2162 - protein, 13 aa, synthetic construct
GHDSPHKSWVRQQ

SEQ ID NO: 2163 - protein, 13 aa, synthetic construct
GHESPHKSGQNQH

SEQ ID NO: 2164 - protein, 13 aa, synthetic construct
GHDSPHKIGHNQQ

SEQ ID NO: 2165 - protein, 13 aa, synthetic construct
GHDSPHKSNAWQQ

SEQ ID NO: 2166 - protein, 13 aa, synthetic construct
GHDSPHKSGQSVP

SEQ ID NO: 2167 - protein, 13 aa, synthetic construct
GHESPHKSGQNIQ

SEQ ID NO: 2168 - protein, 13 aa, synthetic construct
GHDSPHKSVQNHL

SEQ ID NO: 2169 - protein, 13 aa, synthetic construct
GHDSPHKIGLDQQ

SEQ ID NO: 2170 - protein, 13 aa, synthetic construct
ASGSPHSKAQHQQ

SEQ ID NO: 2171 - protein, 13 aa, synthetic construct
GHDSPHKRGPDQQ

SEQ ID NO: 2172 - protein, 13 aa, synthetic construct
GMGSPHSKTQNQQ

SEQ ID NO: 2173 - protein, 13 aa, synthetic construct
GHDSPHKSGESQQ

SEQ ID NO: 2174 - protein, 13 aa, synthetic construct
GHDSPHKHGQNHQ

SEQ ID NO: 2175 - protein, 13 aa, synthetic construct
GTGSPHSKAQNQL

SEQ ID NO: 2176 - protein, 13 aa, synthetic construct
GHDSPHKSVQNKQ

SEQ ID NO: 2177 - protein, 13 aa, synthetic construct
GQVSPHKSGQNQQ

SEQ ID NO: 2178 - protein, 13 aa, synthetic construct
GHDSPHKSGQRQL

SEQ ID NO: 2179 - protein, 13 aa, synthetic construct
GHDSPHKIGQNQL

SEQ ID NO: 2180 - protein, 13 aa, synthetic construct
GHDSPHKSGQIIV

SEQ ID NO: 2181 - protein, 13 aa, synthetic construct
GYDSPHKSGQKQS

SEQ ID NO: 2182 - protein, 13 aa, synthetic construct
GNGSPHSKAQNQE

SEQ ID NO: 2183 - protein, 13 aa, synthetic construct
GDDSPHKSVQNQQ

SEQ ID NO: 2184 - protein, 13 aa, synthetic construct
GHDSPHKSVQSHQ

SEQ ID NO: 2185 - protein, 13 aa, synthetic construct
GHDSPHKSGQFVV

SEQ ID NO: 2186 - protein, 13 aa, synthetic construct
GHDSPHKSRQNLQ

SEQ ID NO: 2187 - protein, 13 aa, synthetic construct
GHNSPHKSGQNQE

SEQ ID NO: 2188 - protein, 13 aa, synthetic construct
GHDSPHKSGQSQP

SEQ ID NO: 2189 - protein, 13 aa, synthetic construct
GHESPHKSGQNEQ

SEQ ID NO: 2190 - protein, 13 aa, synthetic construct
GHDSPHKSGQNQL

SEQ ID NO: 2191 - protein, 13 aa, synthetic construct
GHDSPHKSAQNLL

SEQ ID NO: 2192 - protein, 13 aa, synthetic construct
ASGSPHSKAINQQ

SEQ ID NO: 2193 - protein, 13 aa, synthetic construct
GNGSPHKRGQNQQ

SEQ ID NO: 2194 - protein, 13 aa, synthetic construct
GHDSPHKSGQSLQ

SEQ ID NO: 2195 - protein, 13 aa, synthetic construct
GHDSPHKSAQNHQ

SEQ ID NO: 2196 - protein, 13 aa, synthetic construct
GHDSPHKSGRNRQ

SEQ ID NO: 2197 - protein, 13 aa, synthetic construct
GHDSPHKYGQNEQ

SEQ ID NO: 2198 - protein, 13 aa, synthetic construct
GNGSPHSKAPNLQ

SEQ ID NO: 2199 - protein, 13 aa, synthetic construct
GHDSPHKSQQNQQ

SEQ ID NO: 2200 - protein, 13 aa, synthetic construct
GHDSPHKSVQSKQ

SEQ ID NO: 2201 - protein, 13 aa, synthetic construct
GNDSPHKIGHNQQ

SEQ ID NO: 2202 - protein, 13 aa, synthetic construct
GGGSPHSKAQDQQ

SEQ ID NO: 2203 - protein, 13 aa, synthetic construct
GQDSPHKSGQNPL

SEQ ID NO: 2204 - protein, 13 aa, synthetic construct
ASGSPHSKAQNHQ

SEQ ID NO: 2205 - protein, 13 aa, synthetic construct
GHDSPHKSGRDQK

SEQ ID NO: 2206 - protein, 13 aa, synthetic construct
GHDSPHKSVHNQQ

SEQ ID NO: 2207 - protein, 13 aa, synthetic construct
GHDSPHKSGQWKR

SEQ ID NO: 2208 - protein, 13 aa, synthetic construct
GSGSPHSKAENRQ

SEQ ID NO: 2209 - protein, 13 aa, synthetic construct
GHDSPHKSGQSQQ

SEQ ID NO: 2210 - protein, 13 aa, synthetic construct
GHDSPHKSRQAQQ

SEQ ID NO: 2211 - protein, 13 aa, synthetic construct
GHDSPHKSVQNHQ

SEQ ID NO: 2212 - protein, 13 aa, synthetic construct
GHDSPHKSKQNQQ

SEQ ID NO: 2213 - protein, 13 aa, synthetic construct
GHDSPHKSAQNQL

SEQ ID NO: 2214 - protein, 13 aa, synthetic construct
GHDSPHKSGQTQP

SEQ ID NO: 2215 - protein, 13 aa, synthetic construct
GHDSPHKLWINQQ

SEQ ID NO: 2216 - protein, 13 aa, synthetic construct
GPDSPHKSGQNQQ

SEQ ID NO: 2217 - protein, 13 aa, synthetic construct
GHDSPHKSVQKQL

SEQ ID NO: 2218 - protein, 13 aa, synthetic construct
GHPSPHWKGQNQQ

SEQ ID NO: 2219 - protein, 13 aa, synthetic construct
GHDSPHKSGRNQL

SEQ ID NO: 2220 - protein, 13 aa, synthetic construct
GSGSPHSKVQDQQ

SEQ ID NO: 2221 - protein, 13 aa, synthetic construct
GHDSPHKMGRNQQ

SEQ ID NO: 2222 - protein, 13 aa, synthetic construct
GHDSPHKSGISIQ

SEQ ID NO: 2223 - protein, 13 aa, synthetic construct
GHDSPHKSVQNLQ

SEQ ID NO: 2224 - protein, 13 aa, synthetic construct
GHDSPHKMAHNQQ

SEQ ID NO: 2225 - protein, 13 aa, synthetic construct
GHDSPHKHGQNQQ

SEQ ID NO: 2226 - protein, 13 aa, synthetic construct
GHDSPHKSVQSQQ

SEQ ID NO: 2227 - protein, 13 aa, synthetic construct
GHDSPHKSGQTVC

SEQ ID NO: 2228 - protein, 13 aa, synthetic construct
GQDSPHKSGQYQQ

SEQ ID NO: 2229 - protein, 13 aa, synthetic construct
GHDSPHKSGQQIM

SEQ ID NO: 2230 - protein, 13 aa, synthetic construct
GHDSPHKSRQNEQ

SEQ ID NO: 2231 - protein, 13 aa, synthetic construct
GHDSPHKSGLNHQ

SEQ ID NO: 2232 - protein, 13 aa, synthetic construct
GYDSPHKSGQNQQ

SEQ ID NO: 2233 - protein, 13 aa, synthetic construct
GHDSPHKSGQNLQ

SEQ ID NO: 2234 - protein, 13 aa, synthetic construct
GHDSPHKSRQDQQ

SEQ ID NO: 2235 - protein, 13 aa, synthetic construct
GDDSPHKSGQKQL

SEQ ID NO: 2236 - protein, 13 aa, synthetic construct
GSGSPHSKAQNQA

SEQ ID NO: 2237 - protein, 13 aa, synthetic construct
GDDSPHKSGHNQQ

SEQ ID NO: 2238 - protein, 13 aa, synthetic construct
GHDSPHKSGQMIH

SEQ ID NO: 2239 - protein, 13 aa, synthetic construct
GHDSPHKSGRNHQ

SEQ ID NO: 2240 - protein, 13 aa, synthetic construct
GHDSPHKSVQNRQ

SEQ ID NO: 2241 - protein, 13 aa, synthetic construct
GHDSPHKSGQKMN

SEQ ID NO: 2242 - protein, 16 aa, synthetic construct
TINGSGSPHSKAQNQQ

SEQ ID NO: 2243 - protein, 16 aa, synthetic construct
TINGHDSPHKSGQNQQ

SEQ ID NO: 2244 - protein, 16 aa, synthetic construct
TIIGSGSPHSKAQNRH

SEQ ID NO: 2245 - protein, 16 aa, synthetic construct
TFPGSGSPHSKVQNQQ

SEQ ID NO: 2246 - protein, 16 aa, synthetic construct
TEKMSGSPHSKAQNQQ

SEQ ID NO: 2247 - protein, 16 aa, synthetic construct
EINGRGSPHSKAQNQQ

SEQ ID NO: 2248 - protein, 16 aa, synthetic construct
TVNRNGSPHSKAQNQQ

SEQ ID NO: 2249 - protein, 16 aa, synthetic construct
TVNGSGSPHSKARDQQ

SEQ ID NO: 2250 - protein, 16 aa, synthetic construct
TFNGSGSPHSKAPNLQ

SEQ ID NO: 2251 - protein, 16 aa, synthetic construct
TEKTSGSPHSKAQNQQ

SEQ ID NO: 2252 - protein, 16 aa, synthetic construct
TINGSGSPHSKAHVRQ

SEQ ID NO: 2253 - protein, 16 aa, synthetic construct
TVNGSGSPHSKAPNQH

SEQ ID NO: 2254 - protein, 16 aa, synthetic construct
TEKISGSPHSKAQNQQ

SEQ ID NO: 2255 - protein, 16 aa, synthetic construct
TINGPGSPHSKAHNQQ

SEQ ID NO: 2256 - protein, 16 aa, synthetic construct
TVNGSGSPHSKTQSQQ

SEQ ID NO: 2257 - protein, 16 aa, synthetic construct
SINESGSPHSKAQNQQ

SEQ ID NO: 2258 - protein, 16 aa, synthetic construct
TERTSGSPHSKAQNQQ

SEQ ID NO: 2259 - protein, 16 aa, synthetic construct
TINGSGSPHSKAQPAK

SEQ ID NO: 2260 - protein, 16 aa, synthetic construct
TEKSSGSPHSKAQNQQ

SEQ ID NO: 2261 - protein, 16 aa, synthetic construct
TSYGNGSPHSKAQNQQ

SEQ ID NO: 2262 - protein, 16 aa, synthetic construct
TEKGSGSPHSKAQNQQ

SEQ ID NO: 2263 - protein, 16 aa, synthetic construct
TINGSGSPHSKSQTQQ

SEQ ID NO: 2264 - protein, 16 aa, synthetic construct
TERISGSPHSKAQNQQ

SEQ ID NO: 2265 - protein, 16 aa, synthetic construct
TERASGSPHSKAQNQQ

SEQ ID NO: 2266 - protein, 16 aa, synthetic construct
ELHGSGSPHSKAQNQQ

SEQ ID NO: 2267 - protein, 16 aa, synthetic construct
AINGSGSPHSKAQNLA

SEQ ID NO: 2268 - protein, 16 aa, synthetic construct
TVNGSGSPHSKSQNQL

SEQ ID NO: 2269 - protein, 16 aa, synthetic construct
TERNSGSPHSKAQNQQ

SEQ ID NO: 2270 - protein, 16 aa, synthetic construct
SVNGNGSPHSKAQNQQ

SEQ ID NO: 2271 - protein, 16 aa, synthetic construct
TFNGSGSPHSKAQGQQ

SEQ ID NO: 2272 - protein, 16 aa, synthetic construct
TERVSGSPHSKAQNQQ

SEQ ID NO: 2273 - protein, 16 aa, synthetic construct
TINGSGSPHSKALNRQ

SEQ ID NO: 2274 - protein, 16 aa, synthetic construct
TERLSGSPHSKAQNQQ

SEQ ID NO: 2275 - protein, 16 aa, synthetic construct
TDNGSGSPHSKAHNQQ

SEQ ID NO: 2276 - protein, 16 aa, synthetic construct
TFHGSGSPHSKTQNQQ

SEQ ID NO: 2277 - protein, 16 aa, synthetic construct
TINGGGSPHSKAQTQQ

SEQ ID NO: 2278 - protein, 16 aa, synthetic construct
TSNGSGSPHSKAQNPP

SEQ ID NO: 2279 - protein, 16 aa, synthetic construct
TINGSGSPHSKAQNLQ

SEQ ID NO: 2280 - protein, 16 aa, synthetic construct
TVHGNGSPHSKAQNQQ

SEQ ID NO: 2281 - protein, 16 aa, synthetic construct
TINGGGSPHSKAQNQQ

SEQ ID NO: 2282 - protein, 16 aa, synthetic construct
TENMSGSPHSKAQNQQ

SEQ ID NO: 2283 - protein, 16 aa, synthetic construct
TENVSGSPHSKAQNQQ

SEQ ID NO: 2284 - protein, 16 aa, synthetic construct
TSSGSGSPHSKAQYQQ

SEQ ID NO: 2285 - protein, 16 aa, synthetic construct
TIDGGGSPHSKAQNKQ

SEQ ID NO: 2286 - protein, 16 aa, synthetic construct
TEKVSGSPHSKAQNQQ

SEQ ID NO: 2287 - protein, 16 aa, synthetic construct
AINGSGSPHSKAQDQE

SEQ ID NO: 2288 - protein, 16 aa, synthetic construct
TCNKSGSPHSKAQNQQ

SEQ ID NO: 2289 - protein, 16 aa, synthetic construct
TINGGGSPHSKAQNQL

SEQ ID NO: 2290 - protein, 16 aa, synthetic construct
NINGGGSPHSKAQNQQ

SEQ ID NO: 2291 - protein, 16 aa, synthetic construct
TEHLSGSPHSKAQNQQ

SEQ ID NO: 2292 - protein, 16 aa, synthetic construct
AEMGSGSPHSKAQNQQ

SEQ ID NO: 2293 - protein, 16 aa, synthetic construct
ATNGSGSPHSKAQNHQ

SEQ ID NO: 2294 - protein, 16 aa, synthetic construct
AIKGSGSPHSKAQDQQ

SEQ ID NO: 2295 - protein, 16 aa, synthetic construct
TINGGGSPHSKSQNQL

SEQ ID NO: 2296 - protein, 16 aa, synthetic construct
TVNGNGSPHSKAQNKQ

SEQ ID NO: 2297 - protein, 16 aa, synthetic construct
TINGSGSPHSKGHWQQ

SEQ ID NO: 2298 - protein, 16 aa, synthetic construct
TDKTSGSPHSKAQNQQ

SEQ ID NO: 2299 - protein, 16 aa, synthetic construct
TFKGSGSPHSKAPNQQ

SEQ ID NO: 2300 - protein, 16 aa, synthetic construct
TVNGSGSPHSKAQNQL

SEQ ID NO: 2301 - protein, 16 aa, synthetic construct
TINGSGSPHSKRPEQQ

SEQ ID NO: 2302 - protein, 16 aa, synthetic construct
TINGSGSPHSKAQRTM

SEQ ID NO: 2303 - protein, 16 aa, synthetic construct
TEKASGSPHSKAQNQQ

SEQ ID NO: 2304 - protein, 16 aa, synthetic construct
SDQGSGSPHSKAQNQQ

SEQ ID NO: 2305 - protein, 16 aa, synthetic construct
TEITSGSPHSKAQNQQ

SEQ ID NO: 2306 - protein, 16 aa, synthetic construct
TDKSSGSPHSKAQNQQ

SEQ ID NO: 2307 - protein, 16 aa, synthetic construct
TIDGSGSPHSKAQNQQ

SEQ ID NO: 2308 - protein, 16 aa, synthetic construct
TVNGNGSPHSKAQNQH

SEQ ID NO: 2309 - protein, 16 aa, synthetic construct
NTNGSGSPHSKAQNQQ

SEQ ID NO: 2310 - protein, 16 aa, synthetic construct
TETHSGSPHSKAQNQQ

SEQ ID NO: 2311 - protein, 16 aa, synthetic construct
TINGGGSPHSKALNQQ

SEQ ID NO: 2312 - protein, 16 aa, synthetic construct
TINGSGSPHSKALHQH

SEQ ID NO: 2313 - protein, 16 aa, synthetic construct
TINGTGSPHSKAQNHQ

SEQ ID NO: 2314 - protein, 16 aa, synthetic construct
TINGSGSPHSKAQHRI

SEQ ID NO: 2315 - protein, 16 aa, synthetic construct
TINGSGSPHSKAQYIH

SEQ ID NO: 2316 - protein, 16 aa, synthetic construct
TENISGSPHSKAQNQQ

SEQ ID NO: 2317 - protein, 16 aa, synthetic construct
TIIGGGSPHSKAHNQQ

SEQ ID NO: 2318 - protein, 16 aa, synthetic construct
TINGSGSPHSKAQKFE

SEQ ID NO: 2319 - protein, 16 aa, synthetic construct
TSNESGSPHSKAQNHQ

SEQ ID NO: 2320 - protein, 16 aa, synthetic construct
TINGSGSPHSKAQFPS

SEQ ID NO: 2321 - protein, 16 aa, synthetic construct
TERPSGSPHSKAQNQQ

SEQ ID NO: 2322 - protein, 16 aa, synthetic construct
TINGNGSPHSKAQNPL

SEQ ID NO: 2323 - protein, 16 aa, synthetic construct
SIKGNGSPHSKAQNQQ

SEQ ID NO: 2324 - protein, 16 aa, synthetic construct
TERMSGSPHSKAQNQQ

SEQ ID NO: 2325 - protein, 16 aa, synthetic construct
TERSSGSPHSKAQNQQ

SEQ ID NO: 2326 - protein, 16 aa, synthetic construct
TELHSGSPHSKAQNQQ

SEQ ID NO: 2327 - protein, 16 aa, synthetic construct
TELTSGSPHSKAQNQQ

SEQ ID NO: 2328 - protein, 16 aa, synthetic construct
TINGSGSPHSKAHNQQ

SEQ ID NO: 2329 - protein, 16 aa, synthetic construct
TINGGGSPHSKAQSQQ

SEQ ID NO: 2330 - protein, 16 aa, synthetic construct
TINGSGSPHSKAQAIK

SEQ ID NO: 2331 - protein, 16 aa, synthetic construct
TENTSGSPHSKAQNQQ

SEQ ID NO: 2332 - protein, 16 aa, synthetic construct
TIDGSGSPHSKGQNRQ

SEQ ID NO: 2333 - protein, 16 aa, synthetic construct
NINGSGSPHSKAQSQQ

SEQ ID NO: 2334 - protein, 16 aa, synthetic construct
TINGSVSPHGKAQNQL

SEQ ID NO: 2335 - protein, 16 aa, synthetic construct
TSNASGSPHSKAQNQL

SEQ ID NO: 2336 - protein, 16 aa, synthetic construct
TEARSGSPHSKAQNQQ

SEQ ID NO: 2337 - protein, 16 aa, synthetic construct
TEKNSGSPHSKAQNQQ

SEQ ID NO: 2338 - protein, 16 aa, synthetic construct
TANGSGSPHSKAQYQQ

SEQ ID NO: 2339 - protein, 16 aa, synthetic construct
TVNGSGSPHSKAQYQH

SEQ ID NO: 2340 - protein, 16 aa, synthetic construct
TINGSGSPHTKAQNPQ

SEQ ID NO: 2341 - protein, 16 aa, synthetic construct
TINGSGSPHSKGQNPP

SEQ ID NO: 2342 - protein, 16 aa, synthetic construct
TIIGSGSPHSKAQHQL

SEQ ID NO: 2343 - protein, 16 aa, synthetic construct
TINGSGSPHSKAQSPP

SEQ ID NO: 2344 - protein, 16 aa, synthetic construct
TIYGSGSPHSKAQNQQ

SEQ ID NO: 2345 - protein, 16 aa, synthetic construct
TINGSGSPHSKAQAKL

SEQ ID NO: 2346 - protein, 16 aa, synthetic construct
TDKNSGSPHSKAQNQQ

SEQ ID NO: 2347 - protein, 16 aa, synthetic construct
TINGSGSPHSKTKSQQ

SEQ ID NO: 2348 - protein, 16 aa, synthetic construct
TINGSGSPHSKAQDRP

SEQ ID NO: 2349 - protein, 16 aa, synthetic construct
TINGIGSPHSKAQNLG

SEQ ID NO: 2350 - protein, 16 aa, synthetic construct
TINGSGSPHSKAQSQQ

SEQ ID NO: 2351 - protein, 16 aa, synthetic construct
TENLSGSPHSKAQNQQ

SEQ ID NO: 2352 - protein, 16 aa, synthetic construct
TINGSGSPHSKAQAFH

SEQ ID NO: 2353 - protein, 16 aa, synthetic construct
TINGSGSPHSKAQKQQ

SEQ ID NO: 2354 - protein, 16 aa, synthetic construct
TFSGSGSPHSKAQNLQ

SEQ ID NO: 2355 - protein, 16 aa, synthetic construct
AINGSGSPHSKAQNAQ

SEQ ID NO: 2356 - protein, 16 aa, synthetic construct
TESWSGSPHSKAQNQQ

SEQ ID NO: 2357 - protein, 16 aa, synthetic construct
TTNGSGSPHSKAHNQL

SEQ ID NO: 2358 - protein, 16 aa, synthetic construct
TVNGNGSPHSKAQNHQ

SEQ ID NO: 2359 - protein, 16 aa, synthetic construct
TEDKSGSPHSKAQNQQ

SEQ ID NO: 2360 - protein, 16 aa, synthetic construct
TESASGSPHSKAQNQQ

SEQ ID NO: 2361 - protein, 16 aa, synthetic construct
TNNGSGSPHSKAQNQQ

SEQ ID NO: 2362 - protein, 16 aa, synthetic construct
TSNGGGSPHSKAQNLQ

SEQ ID NO: 2363 - protein, 16 aa, synthetic construct
TDKMSGSPHSKAQNQQ

SEQ ID NO: 2364 - protein, 16 aa, synthetic construct
EVHGSGSPHSKAQNQQ

SEQ ID NO: 2365 - protein, 16 aa, synthetic construct
TINGSGSPHSKAQKLN

SEQ ID NO: 2366 - protein, 16 aa, synthetic construct
TINGGGSPHSKSQNQH

SEQ ID NO: 2367 - protein, 16 aa, synthetic construct
TVNGGGSPHSKAQSQQ

SEQ ID NO: 2368 - protein, 16 aa, synthetic construct
TTNGSGSPHSKAQYQH

SEQ ID NO: 2369 - protein, 16 aa, synthetic construct
TISGSGSPHSKAQYQH

SEQ ID NO: 2370 - protein, 16 aa, synthetic construct
TESTSGSPHSKAQNQQ

SEQ ID NO: 2371 - protein, 16 aa, synthetic construct
TINGSGSPHSKSQNVQ

SEQ ID NO: 2372 - protein, 16 aa, synthetic construct
SINGSGSPHSKAQAQQ

SEQ ID NO: 2373 - protein, 16 aa, synthetic construct
TVNGSGSPHSKAQNLQ

SEQ ID NO: 2374 - protein, 16 aa, synthetic construct
TVRDSGSPHSKAQNQQ

SEQ ID NO: 2375 - protein, 16 aa, synthetic construct
TFNASGSPHSKAPNQQ

SEQ ID NO: 2376 - protein, 16 aa, synthetic construct
TDRMSGSPHSKAQNQQ

SEQ ID NO: 2377 - protein, 16 aa, synthetic construct
TINGSGSPHSKAQTPP

SEQ ID NO: 2378 - protein, 16 aa, synthetic construct
TIKGSGSPHSKAQNQQ

SEQ ID NO: 2379 - protein, 16 aa, synthetic construct
NHIGSGSPHSKAQNQQ

SEQ ID NO: 2380 - protein, 16 aa, synthetic construct
TINGSGSPHSKAQYQH

SEQ ID NO: 2381 - protein, 16 aa, synthetic construct
TIPIDGSPHSKAQNQQ

SEQ ID NO: 2382 - protein, 16 aa, synthetic construct
TINGSGSPHSKAQGQQ

SEQ ID NO: 2383 - protein, 16 aa, synthetic construct
TFNGSGSPHNKAQNHQ

SEQ ID NO: 2384 - protein, 16 aa, synthetic construct
ESDGSGSPHSKAQNQQ

SEQ ID NO: 2385 - protein, 16 aa, synthetic construct
TINGSGSPHSKAQPPA

SEQ ID NO: 2386 - protein, 16 aa, synthetic construct
TINGSGSPHSKAQERP

SEQ ID NO: 2387 - protein, 16 aa, synthetic construct
TIKGSGSPHSKAQDLQ

SEQ ID NO: 2388 - protein, 16 aa, synthetic construct
TDLKSGSPHSKAQNQQ

SEQ ID NO: 2389 - protein, 16 aa, synthetic construct
TINGGGSPHSKAQNPP

SEQ ID NO: 2390 - protein, 16 aa, synthetic construct
TINGSGSPHSKAQAMH

SEQ ID NO: 2391 - protein, 16 aa, synthetic construct
TVPNSGSPHSKAQNQQ

SEQ ID NO: 2392 - protein, 16 aa, synthetic construct
TVIGSGSPHSKALNQQ

SEQ ID NO: 2393 - protein, 16 aa, synthetic construct
TINGSGSPHSKAQHPS

SEQ ID NO: 2394 - protein, 16 aa, synthetic construct
TINGLGSPHSKSQNQQ

SEQ ID NO: 2395 - protein, 16 aa, synthetic construct
TINGTGSPHSKAQNQQ

SEQ ID NO: 2396 - protein, 16 aa, synthetic construct
TINGSGSPHSKAPGLQ

SEQ ID NO: 2397 - protein, 16 aa, synthetic construct
TINGSGSPHSKAQGIR

SEQ ID NO: 2398 - protein, 16 aa, synthetic construct
TESHSGSPHSKAQNQQ

SEQ ID NO: 2399 - protein, 16 aa, synthetic construct
TINGSGSPHSKAQAPA

SEQ ID NO: 2400 - protein, 16 aa, synthetic construct
TINGSGSPHSKSQSQQ

SEQ ID NO: 2401 - protein, 16 aa, synthetic construct
AEHGSGSPHSKAQNQQ

SEQ ID NO: 2402 - protein, 16 aa, synthetic construct
TEDRSGSPHSKAQNQQ

SEQ ID NO: 2403 - protein, 16 aa, synthetic construct
NCLGSGSPHSKAQNQQ

SEQ ID NO: 2404 - protein, 16 aa, synthetic construct
TDRGSGSPHSKAQNQQ

SEQ ID NO: 2405 - protein, 16 aa, synthetic construct
TINGSGSPHSKAQIPP

SEQ ID NO: 2406 - protein, 16 aa, synthetic construct
TVKGSGSPHSKAQDQQ

SEQ ID NO: 2407 - protein, 16 aa, synthetic construct
NADGSGSPHSKAQNQQ

SEQ ID NO: 2408 - protein, 16 aa, synthetic construct
TDKVSGSPHSKAQNQQ

SEQ ID NO: 2409 - protein, 16 aa, synthetic construct
TITGSGSPHSKAQTQL

SEQ ID NO: 2410 - protein, 16 aa, synthetic construct
TINGSGSPHSKAQAPS

SEQ ID NO: 2411 - protein, 16 aa, synthetic construct
NCVGSGSPHSKAQNQQ

SEQ ID NO: 2412 - protein, 16 aa, synthetic construct
TIRDAGSPHSKAQNQQ

SEQ ID NO: 2413 - protein, 16 aa, synthetic construct
TVKDSGSPHSKAQNQQ

SEQ ID NO: 2414 - protein, 16 aa, synthetic construct
NALGSGSPHSKAQNQQ

SEQ ID NO: 2415 - protein, 16 aa, synthetic construct
VINGSGSPHSKGQNQQ

SEQ ID NO: 2416 - protein, 16 aa, synthetic construct
TVNGGGSPHSKAQNQQ

SEQ ID NO: 2417 - protein, 16 aa, synthetic construct
TIQDGGSPHSKAQNQQ

SEQ ID NO: 2418 - protein, 16 aa, synthetic construct
TISGGGSPHSKAQNQQ

SEQ ID NO: 2419 - protein, 16 aa, synthetic construct
TSNASGSPHSKAHNQQ

SEQ ID NO: 2420 - protein, 16 aa, synthetic construct
TINGSGSPHSKAQNTY

SEQ ID NO: 2421 - protein, 16 aa, synthetic construct
TINGSGSPHSKSQNQH

SEQ ID NO: 2422 - protein, 16 aa, synthetic construct
TINGGGSPHSKAQDKQ

SEQ ID NO: 2423 - protein, 16 aa, synthetic construct
TEFVSGSPHSKAQNQQ

SEQ ID NO: 2424 - protein, 16 aa, synthetic construct
TVNGSGSPHSKAQNHL

SEQ ID NO: 2425 - protein, 16 aa, synthetic construct
TREISGSPHSKAQNQQ

SEQ ID NO: 2426 - protein, 16 aa, synthetic construct
TINGSGSPHSKAQIGM

SEQ ID NO: 2427 - protein, 16 aa, synthetic construct
TIDGSGSPHSKALNKQ

SEQ ID NO: 2428 - protein, 16 aa, synthetic construct
TIIGGGSPHSKAQNPQ

SEQ ID NO: 2429 - protein, 16 aa, synthetic construct
QGEGSGSPHSKAQNQQ

SEQ ID NO: 2430 - protein, 16 aa, synthetic construct
TINGTGSPHSKAPNQL

SEQ ID NO: 2431 - protein, 16 aa, synthetic construct
TVNGSGSPHSKAQLQQ

SEQ ID NO: 2432 - protein, 16 aa, synthetic construct
TFNGGGSPHSKAQYQQ

SEQ ID NO: 2433 - protein, 16 aa, synthetic construct
SINGSGSPHSKTQSQQ

SEQ ID NO: 2434 - protein, 16 aa, synthetic construct
TVNGGGSPHSKAQHQQ

SEQ ID NO: 2435 - protein, 16 aa, synthetic construct
SEKGSGSPHSKAQNQQ

SEQ ID NO: 2436 - protein, 16 aa, synthetic construct
NVNGSGSPHSKAQNQQ

SEQ ID NO: 2437 - protein, 16 aa, synthetic construct
GGEGSGSPHSKAQNQQ

SEQ ID NO: 2438 - protein, 16 aa, synthetic construct
TINGSGSPHSKAQRMS

SEQ ID NO: 2439 - protein, 16 aa, synthetic construct
TINGSGSPHSKAQGIL

SEQ ID NO: 2440 - protein, 16 aa, synthetic construct
EFVGSGSPHSKAQNQQ

SEQ ID NO: 2441 - protein, 16 aa, synthetic construct
TIIGSGSPHSKAQDRQ

SEQ ID NO: 2442 - protein, 16 aa, synthetic construct
SDKGSGSPHSKAQNQQ

SEQ ID NO: 2443 - protein, 16 aa, synthetic construct
TEQVSGSPHSKAQNQQ

SEQ ID NO: 2444 - protein, 16 aa, synthetic construct
TEHVSGSPHSKAQNQQ

SEQ ID NO: 2445 - protein, 16 aa, synthetic construct
TINGSGSPHSKARDWQ

SEQ ID NO: 2446 - protein, 16 aa, synthetic construct
TENASGSPHSKAQNQQ

SEQ ID NO: 2447 - protein, 16 aa, synthetic construct
EVQGSGSPHSKAQNQQ

SEQ ID NO: 2448 - protein, 16 aa, synthetic construct
TINGSGSPHSKAQNTH

SEQ ID NO: 2449 - protein, 16 aa, synthetic construct
TINGSGSPHSKAPNLQ

SEQ ID NO: 2450 - protein, 16 aa, synthetic construct
TINGSGSPHSKAQERS

SEQ ID NO: 2451 - protein, 16 aa, synthetic construct
TSNGSGSPHSKAQNYQ

SEQ ID NO: 2452 - protein, 16 aa, synthetic construct
TEYISGSPHSKAQNQQ

SEQ ID NO: 2453 - protein, 16 aa, synthetic construct
TINGSGSPHSKAQRTC

SEQ ID NO: 2454 - protein, 16 aa, synthetic construct
TINGSGSPHSKAQIGH

SEQ ID NO: 2455 - protein, 16 aa, synthetic construct
NCWGSGSPHSKAQNQQ

SEQ ID NO: 2456 - protein, 16 aa, synthetic construct
TINGSGSPHSKAQGAI

SEQ ID NO: 2457 - protein, 16 aa, synthetic construct
TDVNSGSPHSKAQNQQ

SEQ ID NO: 2458 - protein, 16 aa, synthetic construct
SDIGSGSPHSKAQNQQ

SEQ ID NO: 2459 - protein, 16 aa, synthetic construct
TINGSGSPHSKAQVPP

SEQ ID NO: 2460 - protein, 16 aa, synthetic construct
TINGSGSPHSKAQVQQ

SEQ ID NO: 2461 - protein, 16 aa, synthetic construct
TINGSGSPHSKALMRQ

SEQ ID NO: 2462 - protein, 16 aa, synthetic construct
TINGSGSPHSKAQYSV

SEQ ID NO: 2463 - protein, 16 aa, synthetic construct
NSIGSGSPHSKAQNQQ

SEQ ID NO: 2464 - protein, 16 aa, synthetic construct
TINGSGSPHSKVPNLQ

SEQ ID NO: 2465 - protein, 16 aa, synthetic construct
AINGSGSPHSKAQSQQ

SEQ ID NO: 2466 - protein, 16 aa, synthetic construct
TINGSGSPHSKAQAIT

SEQ ID NO: 2467 - protein, 16 aa, synthetic construct
TINGSGSPHSKAQKTL

SEQ ID NO: 2468 - protein, 16 aa, synthetic construct
TVNGSGSPHSKAQNQW

SEQ ID NO: 2469 - protein, 16 aa, synthetic construct
TINGSGSPHSKAQLHH

SEQ ID NO: 2470 - protein, 16 aa, synthetic construct
TEQTSGSPHSKAQNQQ

SEQ ID NO: 2471 - protein, 16 aa, synthetic construct
TINGSGSPHSKAQNII

SEQ ID NO: 2472 - protein, 16 aa, synthetic construct
NSLGSGSPHSKAQNQQ

SEQ ID NO: 2473 - protein, 16 aa, synthetic construct
TIPMEGSPHSKAQNQQ

SEQ ID NO: 2474 - protein, 16 aa, synthetic construct
TINGSGSPHSKAQGHH

SEQ ID NO: 2475 - protein, 16 aa, synthetic construct
TDRTSGSPHSKAQNQQ

SEQ ID NO: 2476 - protein, 16 aa, synthetic construct
TINGSGSPHSKAQSKV

SEQ ID NO: 2477 - protein, 16 aa, synthetic construct
EVVGSGSPHSKAQNQQ

SEQ ID NO: 2478 - protein, 16 aa, synthetic construct
TINGSGSPHSKAQLPS

SEQ ID NO: 2479 - protein, 16 aa, synthetic construct
TINGSGSPHSKAIGKQ

SEQ ID NO: 2480 - protein, 16 aa, synthetic construct
TEPTSGSPHSKAQNQQ

SEQ ID NO: 2481 - protein, 16 aa, synthetic construct
TVNGGGSPHSKSQNQQ

SEQ ID NO: 2482 - protein, 16 aa, synthetic construct
TINGSGSPHSKAQAIH

SEQ ID NO: 2483 - protein, 16 aa, synthetic construct
TINGSGSPHSKAQHGL

SEQ ID NO: 2484 - protein, 16 aa, synthetic construct
SELGSGSPHSKAQNQQ

SEQ ID NO: 2485 - protein, 16 aa, synthetic construct
TINGSGSPHSKAQFMC

SEQ ID NO: 2486 - protein, 16 aa, synthetic construct
TINVSGSPHSKAQGQQ

SEQ ID NO: 2487 - protein, 16 aa, synthetic construct
TINGGGSPHSKAQNQM

SEQ ID NO: 2488 - protein, 16 aa, synthetic construct
TVNGSGSPHSKAQHLQ

SEQ ID NO: 2489 - protein, 16 aa, synthetic construct
TIRENGSPHSKAQNQQ

SEQ ID NO: 2490 - protein, 16 aa, synthetic construct
TINGSGSPHSKTQNHQ

SEQ ID NO: 2491 - protein, 16 aa, synthetic construct
TINGSGSPHSKAQPAR

SEQ ID NO: 2492 - protein, 16 aa, synthetic construct
TVNGSGSPHSKAQSLQ

SEQ ID NO: 2493 - protein, 16 aa, synthetic construct
TINGSGSPHSKSQSQL

SEQ ID NO: 2494 - protein, 16 aa, synthetic construct
TINGSASPHSKAHSQQ

SEQ ID NO: 2495 - protein, 16 aa, synthetic construct
TWQNSGSPHSKAQNQQ

SEQ ID NO: 2496 - protein, 16 aa, synthetic construct
TINGSGSPHSKAQDRQ

SEQ ID NO: 2497 - protein, 16 aa, synthetic construct
TINGSGSPHSKAQMPS

SEQ ID NO: 2498 - protein, 16 aa, synthetic construct
TNNGGGSPHSKAQNLQ

SEQ ID NO: 2499 - protein, 16 aa, synthetic construct
TINGSGSPHSKAQGSL

SEQ ID NO: 2500 - protein, 16 aa, synthetic construct
TEVTSGSPHSKAQNQQ

SEQ ID NO: 2501 - protein, 16 aa, synthetic construct
SINGGGSPHSKAQYQQ

SEQ ID NO: 2502 - protein, 16 aa, synthetic construct
TVIGSGSPHSKSQNQQ

SEQ ID NO: 2503 - protein, 16 aa, synthetic construct
AVNVSGSPHSKAQNQQ

SEQ ID NO: 2504 - protein, 16 aa, synthetic construct
TVNGNGSPHSKSQNQQ

SEQ ID NO: 2505 - protein, 16 aa, synthetic construct
TDRNSGSPHSKAQNQQ

SEQ ID NO: 2506 - protein, 16 aa, synthetic construct
TINGSGSPHSKAQVPA

SEQ ID NO: 2507 - protein, 16 aa, synthetic construct
GVLGSGSPHSKAQNQQ

SEQ ID NO: 2508 - protein, 16 aa, synthetic construct
TLNGNGSPHSKAQNLQ

SEQ ID NO: 2509 - protein, 16 aa, synthetic construct
AINGSGSPHSKAQDKQ

SEQ ID NO: 2510 - protein, 16 aa, synthetic construct
TSNGSGSPHSKAHYQQ

SEQ ID NO: 2511 - protein, 16 aa, synthetic construct
TINGSGSPHSKAQVPS

SEQ ID NO: 2512 - protein, 16 aa, synthetic construct
TELRSGSPHSKAQNQQ

SEQ ID NO: 2513 - protein, 16 aa, synthetic construct
NINGSGSPHSKAQNHQ

SEQ ID NO: 2514 - protein, 16 aa, synthetic construct
TVNGGGSPHSKAQNHQ

SEQ ID NO: 2515 - protein, 16 aa, synthetic construct
TINGSGSPHSKARGEQ

SEQ ID NO: 2516 - protein, 16 aa, synthetic construct
TINGGGSPHSKAQYQH

SEQ ID NO: 2517 - protein, 16 aa, synthetic construct
TEDLSGSPHSKAQNQQ

SEQ ID NO: 2518 - protein, 16 aa, synthetic construct
TINGSGSPHSKAPGQQ

SEQ ID NO: 2519 - protein, 16 aa, synthetic construct
TIPKNGSPHSKAQNQQ

SEQ ID NO: 2520 - protein, 16 aa, synthetic construct
TINGSGSPHSKAQSLQ

SEQ ID NO: 2521 - protein, 16 aa, synthetic construct
TINGSGSPHSKRLEQQ

SEQ ID NO: 2522 - protein, 16 aa, synthetic construct
TERGSGSPHSKAQNQQ

SEQ ID NO: 2523 - protein, 16 aa, synthetic construct
TVNGSGSPHSKAPNQQ

SEQ ID NO: 2524 - protein, 16 aa, synthetic construct
TSNGSGSPHSKAQNQS

SEQ ID NO: 2525 - protein, 16 aa, synthetic construct
TINGSGSPHSKAQKVI

SEQ ID NO: 2526 - protein, 16 aa, synthetic construct
TEGISGSPHSKAQNQQ

SEQ ID NO: 2527 - protein, 16 aa, synthetic construct
TINGSGSPHSKAQNND

SEQ ID NO: 2528 - protein, 16 aa, synthetic construct
TINGSGSPHSKAQSVH

SEQ ID NO: 2529 - protein, 16 aa, synthetic construct
TINGSGSPHSKAQPLG

SEQ ID NO: 2530 - protein, 16 aa, synthetic construct
TINKEGSPHSKAQNQQ

SEQ ID NO: 2531 - protein, 16 aa, synthetic construct
TCNASGSPHSKAQNQQ

SEQ ID NO: 2532 - protein, 16 aa, synthetic construct
AINGSGSPHSKAHNQE

SEQ ID NO: 2533 - protein, 16 aa, synthetic construct
TEGLSGSPHSKAQNQQ

SEQ ID NO: 2534 - protein, 16 aa, synthetic construct
TRDASGSPHSKAQNQQ

SEQ ID NO: 2535 - protein, 16 aa, synthetic construct
TSNGSGSPHSKAQNLQ

SEQ ID NO: 2536 - protein, 16 aa, synthetic construct
TGNGSGSPHSKAQIQQ

SEQ ID NO: 2537 - protein, 16 aa, synthetic construct
TVNGGGSPHSKAQNLQ

SEQ ID NO: 2538 - protein, 16 aa, synthetic construct
TDRSSGSPHSKAQNQQ

SEQ ID NO: 2539 - protein, 16 aa, synthetic construct
TINGSGSPHSKAQVRN

SEQ ID NO: 2540 - protein, 16 aa, synthetic construct
TINGSGSPHSKAPSNQ

SEQ ID NO: 2541 - protein, 16 aa, synthetic construct
TINGSGSPHSKAQVGH

SEQ ID NO: 2542 - protein, 16 aa, synthetic construct
NAIGSGSPHSKAQNQQ

SEQ ID NO: 2543 - protein, 16 aa, synthetic construct
AENGSGSPHSKAQNQQ

SEQ ID NO: 2544 - protein, 16 aa, synthetic construct
TINGSGSPHSKAQRDI

SEQ ID NO: 2545 - protein, 16 aa, synthetic construct
TINGSGSPHSKAQMPN

SEQ ID NO: 2546 - protein, 16 aa, synthetic construct
TVNGSGSPHSKSQNQQ

SEQ ID NO: 2547 - protein, 16 aa, synthetic construct
TIPAIGSPHSKAQNQQ

SEQ ID NO: 2548 - protein, 16 aa, synthetic construct
TINGSGSPHSKARGLQ

SEQ ID NO: 2549 - protein, 16 aa, synthetic construct
TELGSGSPHSKAQNQQ

SEQ ID NO: 2550 - protein, 16 aa, synthetic construct
AETGSGSPHSKAQNQQ

SEQ ID NO: 2551 - protein, 16 aa, synthetic construct
TINGSGSPHSKLQKQQ

SEQ ID NO: 2552 - protein, 16 aa, synthetic construct
TINGSGSPHSKAPSLQ

SEQ ID NO: 2553 - protein, 16 aa, synthetic construct
TINGSGSPHSKAQRDQ

SEQ ID NO: 2554 - protein, 16 aa, synthetic construct
TDVGSGSPHSKAQNQQ

SEQ ID NO: 2555 - protein, 16 aa, synthetic construct
TINGSGSPHSKNRDQQ

SEQ ID NO: 2556 - protein, 16 aa, synthetic construct
SINGSGSPHSKAPNLQ

SEQ ID NO: 2557 - protein, 16 aa, synthetic construct
TINGSGSPHSKAQAKG

SEQ ID NO: 2558 - protein, 16 aa, synthetic construct
TVNGSGSPHSKAQDKQ

SEQ ID NO: 2559 - protein, 16 aa, synthetic construct
TINGGGSPHSKAQNPQ

SEQ ID NO: 2560 - protein, 16 aa, synthetic construct
TINGSGSPHSKAQSAH

SEQ ID NO: 2561 - protein, 16 aa, synthetic construct
TINGNGSPHSKSQNQH

SEQ ID NO: 2562 - protein, 16 aa, synthetic construct
TVPTSGSPHSKAQNQQ

SEQ ID NO: 2563 - protein, 16 aa, synthetic construct
TIDGSGSPHSKSQNHQ

SEQ ID NO: 2564 - protein, 16 aa, synthetic construct
TDVKSGSPHSKAQNQQ

SEQ ID NO: 2565 - protein, 16 aa, synthetic construct
AINRSGSPHSKAQDQQ

SEQ ID NO: 2566 - protein, 16 aa, synthetic construct
TINGSGSPHSKAQSTM

SEQ ID NO: 2567 - protein, 16 aa, synthetic construct
TVNASGSPHSKAQNQL

SEQ ID NO: 2568 - protein, 16 aa, synthetic construct
TINGSGSPHSKAQREM

SEQ ID NO: 2569 - protein, 16 aa, synthetic construct
TVHGSGSPHSKAQSQQ

SEQ ID NO: 2570 - protein, 16 aa, synthetic construct
TINGGGSPHSKSQNRQ

SEQ ID NO: 2571 - protein, 16 aa, synthetic construct
TINGSGSPHSKAQYRA

SEQ ID NO: 2572 - protein, 16 aa, synthetic construct
TINGGGSPHSKAQRQQ

SEQ ID NO: 2573 - protein, 16 aa, synthetic construct
TEPMSGSPHSKAQNQQ

SEQ ID NO: 2574 - protein, 16 aa, synthetic construct
TINGSGSPHSKNQWQQ

SEQ ID NO: 2575 - protein, 16 aa, synthetic construct
ETAGSGSPHSKAQNQQ

SEQ ID NO: 2576 - protein, 16 aa, synthetic construct
TINGSGSPHSKAQRMN

SEQ ID NO: 2577 - protein, 16 aa, synthetic construct
NNLGSGSPHSKAQNQQ

SEQ ID NO: 2578 - protein, 16 aa, synthetic construct
TINGSGSPHAKAQNHQ

SEQ ID NO: 2579 - protein, 16 aa, synthetic construct
TIIKNGSPHSKAQNQQ

SEQ ID NO: 2580 - protein, 16 aa, synthetic construct
TINGSGSPHSKAGDSQ

SEQ ID NO: 2581 - protein, 16 aa, synthetic construct
TINGSGSPHSKLKSQQ

SEQ ID NO: 2582 - protein, 16 aa, synthetic construct
TINGSGSPHSKAQKIS

SEQ ID NO: 2583 - protein, 16 aa, synthetic construct
TEYNSGSPHSKAQNQQ

SEQ ID NO: 2584 - protein, 16 aa, synthetic construct
TINGSGSPHSKAPSMQ

SEQ ID NO: 2585 - protein, 16 aa, synthetic construct
AINGSGSPHSKAQNQQ

SEQ ID NO: 2586 - protein, 16 aa, synthetic construct
TINGSGSPHSKASPRQ

SEQ ID NO: 2587 - protein, 16 aa, synthetic construct
TINGSGSPHSKRMEQQ

SEQ ID NO: 2588 - protein, 16 aa, synthetic construct
TINGSGSPHSKAQYQN

SEQ ID NO: 2589 - protein, 16 aa, synthetic construct
TINGSGSPHSKAQYYV

SEQ ID NO: 2590 - protein, 16 aa, synthetic construct
TINGSGSPHSKLRRQQ

SEQ ID NO: 2591 - protein, 16 aa, synthetic construct
TINGSGSPHSKAGCGQ

SEQ ID NO: 2592 - protein, 16 aa, synthetic construct
SMNGSGSPHSRAQNQQ

SEQ ID NO: 2593 - protein, 16 aa, synthetic construct
TINGSGSPHSKRLRQQ

SEQ ID NO: 2594 - protein, 16 aa, synthetic construct
TINGSGSPHSLRRNQQ

SEQ ID NO: 2595 - protein, 16 aa, synthetic construct
TINGSGSPHSRGRNQQ

SEQ ID NO: 2596 - protein, 16 aa, synthetic construct
TINGSGSPHSSRRNQQ

SEQ ID NO: 2597 - protein, 16 aa, synthetic construct
TINGSGSPHSKAFRLQ

SEQ ID NO: 2598 - protein, 16 aa, synthetic construct
TINGSCSPHRKAQNQQ

SEQ ID NO: 2599 - protein, 16 aa, synthetic construct
TINGSGSPHFLRQNQQ

SEQ ID NO: 2600 - protein, 16 aa, synthetic construct
TINGSGSPHSLRFNQQ

SEQ ID NO: 2601 - protein, 16 aa, synthetic construct
TINGSGSPHSKWLLQQ

SEQ ID NO: 2602 - protein, 16 aa, synthetic construct
TINGSGSPHSKRRLQQ

SEQ ID NO: 2603 - protein, 16 aa, synthetic construct
TINGSGSPHSKAQRKL

SEQ ID NO: 2604 - protein, 16 aa, synthetic construct
TINGSGSPHSKALRRQ

SEQ ID NO: 2605 - protein, 16 aa, synthetic construct
TINGSGSPHSKAQRLR

SEQ ID NO: 2606 - protein, 16 aa, synthetic construct
YLSGSGSPHSKAQNQQ

SEQ ID NO: 2607 - protein, 16 aa, synthetic construct
TINGSGSPHSKAQRRL

SEQ ID NO: 2608 - protein, 16 aa, synthetic construct
TINGSGSPHSKARRQQ

SEQ ID NO: 2609 - protein, 16 aa, synthetic construct
TINGSGSPHSKARRLQ

SEQ ID NO: 2610 - protein, 16 aa, synthetic construct
TINGSGSPHSKSRRQQ

SEQ ID NO: 2611 - protein, 16 aa, synthetic construct
TINGLLSPHWKAQNQQ

SEQ ID NO: 2612 - protein, 16 aa, synthetic construct
TINGSGSPHSKARLRQ

SEQ ID NO: 2613 - protein, 16 aa, synthetic construct
TINGSGSPHSKASKRQ

SEQ ID NO: 2614 - protein, 16 aa, synthetic construct
TINGSGSPHVRRQNQQ

SEQ ID NO: 2615 - protein, 16 aa, synthetic construct
TINGSGSPHSKAQLYR

SEQ ID NO: 2616 - protein, 16 aa, synthetic construct
GLSGSGSPHSKAQNQQ

SEQ ID NO: 2617 - protein, 16 aa, synthetic construct
TINGSGSPHSKAQLTV

SEQ ID NO: 2618 - protein, 16 aa, synthetic construct
TINGHDSPHKRGQHRQ

SEQ ID NO: 2619 - protein, 16 aa, synthetic construct
MPEGHDSPHKSGQNQQ

SEQ ID NO: 2620 - protein, 16 aa, synthetic construct
MEGGHDSPHKSGQNQQ

SEQ ID NO: 2621 - protein, 16 aa, synthetic construct
MEYGHDSPHKSGQNQQ

SEQ ID NO: 2622 - protein, 16 aa, synthetic construct
AEWGHDSPHKSGQNQQ

SEQ ID NO: 2623 - protein, 16 aa, synthetic construct
CEWGHDSPHKSGQNQQ

SEQ ID NO: 2624 - protein, 16 aa, synthetic construct
ANNGQDSPHKSGQNQQ

SEQ ID NO: 2625 - protein, 16 aa, synthetic construct
IPEGHDSPHKSGQNQQ

SEQ ID NO: 2626 - protein, 16 aa, synthetic construct
ADMGHDSPHKSGQNQQ

SEQ ID NO: 2627 - protein, 16 aa, synthetic construct
IEYGHDSPHKSGQNQQ

SEQ ID NO: 2628 - protein, 16 aa, synthetic construct
ADYGHDSPHKSGQNQQ

SEQ ID NO: 2629 - protein, 16 aa, synthetic construct
IETGHDSPHKSGQNQQ

SEQ ID NO: 2630 - protein, 16 aa, synthetic construct
MEWGHDSPHKSGQNQQ

SEQ ID NO: 2631 - protein, 16 aa, synthetic construct
CEYGHDSPHKSGQNQQ

SEQ ID NO: 2632 - protein, 16 aa, synthetic construct
RINGHDSPHKSGQKQQ

SEQ ID NO: 2633 - protein, 16 aa, synthetic construct
MEIGHDSPHKSGQNQQ

SEQ ID NO: 2634 - protein, 16 aa, synthetic construct
LEYGHDSPHKSGQNQQ

SEQ ID NO: 2635 - protein, 16 aa, synthetic construct
ADWGHDSPHKSGQNQQ

SEQ ID NO: 2636 - protein, 16 aa, synthetic construct
IEIGHDSPHKSGQNQQ

SEQ ID NO: 2637 - protein, 16 aa, synthetic construct
DIMGHDSPHKSGQNQQ

SEQ ID NO: 2638 - protein, 16 aa, synthetic construct
FEQGHDSPHKSGQNQQ

SEQ ID NO: 2639 - protein, 16 aa, synthetic construct
MEFGHDSPHKSGQNQQ

SEQ ID NO: 2640 - protein, 16 aa, synthetic construct
CDQGHDSPHKSGQNQQ

SEQ ID NO: 2641 - protein, 16 aa, synthetic construct
LPEGHDSPHKSGQNQQ

SEQ ID NO: 2642 - protein, 16 aa, synthetic construct
IENGHDSPHKSGQNQQ

SEQ ID NO: 2643 - protein, 16 aa, synthetic construct
MESGHDSPHKSGQNQQ

SEQ ID NO: 2644 - protein, 16 aa, synthetic construct
AEIGHDSPHKSGQNQQ

SEQ ID NO: 2645 - protein, 16 aa, synthetic construct
VEYGHDSPHKSGQNQQ

SEQ ID NO: 2646 - protein, 16 aa, synthetic construct
IINGHDSPHKSGLTQQ

SEQ ID NO: 2647 - protein, 16 aa, synthetic construct
TSNGDDSPHKSGRNQQ

SEQ ID NO: 2648 - protein, 16 aa, synthetic construct
IEVGHDSPHKSGQNQQ

SEQ ID NO: 2649 - protein, 16 aa, synthetic construct
MEMGHDSPHKSGQNQQ

SEQ ID NO: 2650 - protein, 16 aa, synthetic construct
AEVGHDSPHKSGQNQQ

SEQ ID NO: 2651 - protein, 16 aa, synthetic construct
MDAGHDSPHKSGQNQQ

SEQ ID NO: 2652 - protein, 16 aa, synthetic construct
VEWGHDSPHKSGQNQQ

SEQ ID NO: 2653 - protein, 16 aa, synthetic construct
AEQGHDSPHKSGQNQQ

SEQ ID NO: 2654 - protein, 16 aa, synthetic construct
LEWGHDSPHKSGQNQQ

SEQ ID NO: 2655 - protein, 16 aa, synthetic construct
MELGHDSPHKSGQNQQ

SEQ ID NO: 2656 - protein, 16 aa, synthetic construct
METGHDSPHKSGQNQQ

SEQ ID NO: 2657 - protein, 16 aa, synthetic construct
MEAGHDSPHKSGQNQQ

SEQ ID NO: 2658 - protein, 16 aa, synthetic construct
IESGHDSPHKSGQNQQ

SEQ ID NO: 2659 - protein, 16 aa, synthetic construct
MEVGHDSPHKSGQNQQ

SEQ ID NO: 2660 - protein, 16 aa, synthetic construct
CEIGHDSPHKSGQNQQ

SEQ ID NO: 2661 - protein, 16 aa, synthetic construct
ATNGHDSPHKSGLNQQ

SEQ ID NO: 2662 - protein, 16 aa, synthetic construct
MDGGHDSPHKSGQNQQ

SEQ ID NO: 2663 - protein, 16 aa, synthetic construct
QEVGHDSPHKSGQNQQ

SEQ ID NO: 2664 - protein, 16 aa, synthetic construct
ADQGHDSPHKSGQNQQ

SEQ ID NO: 2665 - protein, 16 aa, synthetic construct
TINGHESPHKSAQNHQ

SEQ ID NO: 2666 - protein, 16 aa, synthetic construct
TINGHDSPHKSAQNQW

SEQ ID NO: 2667 - protein, 16 aa, synthetic construct
NMNGHDSPHKSGQNTH

SEQ ID NO: 2668 - protein, 16 aa, synthetic construct
IEMGHDSPHKSGQNQQ

SEQ ID NO: 2669 - protein, 16 aa, synthetic construct
TINGHDSPHKSGRRRQ

SEQ ID NO: 2670 - protein, 16 aa, synthetic construct
ISNGHDSPHKSAQNQQ

SEQ ID NO: 2671 - protein, 16 aa, synthetic construct
TGNGHDSPHKSGQYQQ

SEQ ID NO: 2672 - protein, 16 aa, synthetic construct
TINGNYSPHKIGQNQQ

SEQ ID NO: 2673 - protein, 16 aa, synthetic construct
TINGHDSPHKSRQNDQ

SEQ ID NO: 2674 - protein, 16 aa, synthetic construct
QQQGHDSPHKSGQNQQ

SEQ ID NO: 2675 - protein, 16 aa, synthetic construct
HDWGHDSPHKSGQNQQ

SEQ ID NO: 2676 - protein, 16 aa, synthetic construct
IEGGHDSPHKSGQNQQ

SEQ ID NO: 2677 - protein, 16 aa, synthetic construct
TFNRSGSPHSKAQNQQ

SEQ ID NO: 2678 - protein, 16 aa, synthetic construct
AINGHDSPHKSGQIRQ

SEQ ID NO: 2679 - protein, 16 aa, synthetic construct
TINGHDSPHKIGQNQH

SEQ ID NO: 2680 - protein, 16 aa, synthetic construct
AINGYDSPHKSGQKQQ

SEQ ID NO: 2681 - protein, 16 aa, synthetic construct
TESGHDSPHKSGQNQQ

SEQ ID NO: 2682 - protein, 16 aa, synthetic construct
TINGHDSPHKSGQSVQ

SEQ ID NO: 2683 - protein, 16 aa, synthetic construct
TINGHESPHKSGRSQQ

SEQ ID NO: 2684 - protein, 16 aa, synthetic construct
TINGHDSPHKSGQNKL

SEQ ID NO: 2685 - protein, 16 aa, synthetic construct
TINGHDSPHKTGQNQQ

SEQ ID NO: 2686 - protein, 16 aa, synthetic construct
TINGRGSPHKRGQNQQ

SEQ ID NO: 2687 - protein, 16 aa, synthetic construct
TINGSGSPHTKAQNPP

SEQ ID NO: 2688 - protein, 16 aa, synthetic construct
TINGQDSPHKSGQHQQ

SEQ ID NO: 2689 - protein, 16 aa, synthetic construct
SINGHDSPHKSGQIQH

SEQ ID NO: 2690 - protein, 16 aa, synthetic construct
AINGHDSPHKSGPRQQ

SEQ ID NO: 2691 - protein, 16 aa, synthetic construct
TVNGHDSPHKSGHTQQ

SEQ ID NO: 2692 - protein, 16 aa, synthetic construct
SINGHDSPHKSGQRQH

SEQ ID NO: 2693 - protein, 16 aa, synthetic construct
SLNGSGSPHTKAQNQQ

SEQ ID NO: 2694 - protein, 16 aa, synthetic construct
AINGHDSPHKSAQSQQ

SEQ ID NO: 2695 - protein, 16 aa, synthetic construct
SIYGHESPHKSGQNQQ

SEQ ID NO: 2696 - protein, 16 aa, synthetic construct
TVNGHDSPHKSLQNQQ

SEQ ID NO: 2697 - protein, 16 aa, synthetic construct
TINGHGSPHSKAQNPQ

SEQ ID NO: 2698 - protein, 16 aa, synthetic construct
TSNGYDSPHKSGQKQQ

SEQ ID NO: 2699 - protein, 16 aa, synthetic construct
TVNGHDSPHKSGRNQE

SEQ ID NO: 2700 - protein, 16 aa, synthetic construct
TTNGHDSPHKSGQTQL

SEQ ID NO: 2701 - protein, 16 aa, synthetic construct
AINGHDSPHKSEKNQQ

SEQ ID NO: 2702 - protein, 16 aa, synthetic construct
IINGRDSPHKSGQDQQ

SEQ ID NO: 2703 - protein, 16 aa, synthetic construct
TISGHDSPHKTGHNQQ

SEQ ID NO: 2704 - protein, 16 aa, synthetic construct
SINGYDSPHKSGQTQQ

SEQ ID NO: 2705 - protein, 16 aa, synthetic construct
TINGHESPHKSGQTQQ

SEQ ID NO: 2706 - protein, 16 aa, synthetic construct
TINGHDSPHKSGQSKQ

SEQ ID NO: 2707 - protein, 16 aa, synthetic construct
AIIGHESPHKSGQNQQ

SEQ ID NO: 2708 - protein, 16 aa, synthetic construct
TINGHDSPHKTGQNQP

SEQ ID NO: 2709 - protein, 16 aa, synthetic construct
AINGHDSPHKSGQSPQ

SEQ ID NO: 2710 - protein, 16 aa, synthetic construct
TIKGNDSPHKSVQNQQ

SEQ ID NO: 2711 - protein, 16 aa, synthetic construct
TEFGHDSPHKSGQNQQ

SEQ ID NO: 2712 - protein, 16 aa, synthetic construct
TINGHDSPHKSAQNYQ

SEQ ID NO: 2713 - protein, 16 aa, synthetic construct
TFNGSASPHSKALNQQ

SEQ ID NO: 2714 - protein, 16 aa, synthetic construct
TINGHESPHKSAQNRQ

SEQ ID NO: 2715 - protein, 16 aa, synthetic construct
TTNGHDSPHKSGQNQQ

SEQ ID NO: 2716 - protein, 16 aa, synthetic construct
TIKGQDSPHKIGQNQQ

SEQ ID NO: 2717 - protein, 16 aa, synthetic construct
TVNGHDSPHKSGQNHL

SEQ ID NO: 2718 - protein, 16 aa, synthetic construct
SINGHDSPHKSGQYQH

SEQ ID NO: 2719 - protein, 16 aa, synthetic construct
TINGNDSPHKSVQNHQ

SEQ ID NO: 2720 - protein, 16 aa, synthetic construct
TITGHDSPHKSGQNQW

SEQ ID NO: 2721 - protein, 16 aa, synthetic construct
TNNGHDSPHKSVQNQH

SEQ ID NO: 2722 - protein, 16 aa, synthetic construct
TIDGHDSPHKSGQNQH

SEQ ID NO: 2723 - protein, 16 aa, synthetic construct
TVNGHDSPHKSGQTRQ

SEQ ID NO: 2724 - protein, 16 aa, synthetic construct
TVNGHDSPHKSGQNLH

SEQ ID NO: 2725 - protein, 16 aa, synthetic construct
AISGHDSPHKSGLNQQ

SEQ ID NO: 2726 - protein, 16 aa, synthetic construct
AINGHDSPHKSAQNQE

SEQ ID NO: 2727 - protein, 16 aa, synthetic construct
TITGHDSPHKSGQHLQ

SEQ ID NO: 2728 - protein, 16 aa, synthetic construct
TINGHDSPHKSRLNQP

SEQ ID NO: 2729 - protein, 16 aa, synthetic construct
TVDGHDSPHKSGQKQQ

SEQ ID NO: 2730 - protein, 16 aa, synthetic construct
TINGQDSPHKSGQNQD

SEQ ID NO: 2731 - protein, 16 aa, synthetic construct
TIEGHDSPHKSGRNQQ

SEQ ID NO: 2732 - protein, 16 aa, synthetic construct
TTNGHDSPHKSGQNLL

SEQ ID NO: 2733 - protein, 16 aa, synthetic construct
TINGHDSPHKSGQLVI

SEQ ID NO: 2734 - protein, 16 aa, synthetic construct
TVNGHDSPHKSRQSQQ

SEQ ID NO: 2735 - protein, 16 aa, synthetic construct
TINGHDSPHKSGRTQE

SEQ ID NO: 2736 - protein, 16 aa, synthetic construct
TINGHDSPHKSVQTHQ

SEQ ID NO: 2737 - protein, 16 aa, synthetic construct
TSNGHDSPHKSGQNQP

SEQ ID NO: 2738 - protein, 16 aa, synthetic construct
VINGHDSPHKSGQTQQ

SEQ ID NO: 2739 - protein, 16 aa, synthetic construct
TINGPDSPHKIGQNQQ

SEQ ID NO: 2740 - protein, 16 aa, synthetic construct
AVNGHDSPHKSVQNQQ

SEQ ID NO: 2741 - protein, 16 aa, synthetic construct
TINGHDSPHKSRQDQH

SEQ ID NO: 2742 - protein, 16 aa, synthetic construct
AINGPDSPHKSGQKQQ

SEQ ID NO: 2743 - protein, 16 aa, synthetic construct
TINGHDSPHKSRQSQH

SEQ ID NO: 2744 - protein, 16 aa, synthetic construct
TIYGHDSPHKSVQNQL

SEQ ID NO: 2745 - protein, 16 aa, synthetic construct
TVNGHDSPHKSGQNLL

SEQ ID NO: 2746 - protein, 16 aa, synthetic construct
TENKSGSPHSKAQNQQ

SEQ ID NO: 2747 - protein, 16 aa, synthetic construct
TTNGQDSPHKSGQNQQ

SEQ ID NO: 2748 - protein, 16 aa, synthetic construct
TDKGSGSPHSKAQNQQ

SEQ ID NO: 2749 - protein, 16 aa, synthetic construct
TIDGHDSPHKSGRNQQ

SEQ ID NO: 2750 - protein, 16 aa, synthetic construct
TINGYDSPHKSGQYQH

SEQ ID NO: 2751 - protein, 16 aa, synthetic construct
TDNGHDSPHKSRQNQQ

SEQ ID NO: 2752 - protein, 16 aa, synthetic construct
TINGHDSPHKSWVRQQ

SEQ ID NO: 2753 - protein, 16 aa, synthetic construct
TINGHESPHKSGQNQH

SEQ ID NO: 2754 - protein, 16 aa, synthetic construct
TVNGHDSPHKIGHNQQ

SEQ ID NO: 2755 - protein, 16 aa, synthetic construct
TCNGHDSPHKSGRNQQ

SEQ ID NO: 2756 - protein, 16 aa, synthetic construct
TINGNGSPHSKAQNHQ

SEQ ID NO: 2757 - protein, 16 aa, synthetic construct
NVVGHDSPHKSGQNQQ

SEQ ID NO: 2758 - protein, 16 aa, synthetic construct
TINGHDSPHKSNAWQQ

SEQ ID NO: 2759 - protein, 16 aa, synthetic construct
TDAGHDSPHKSGQNQQ

SEQ ID NO: 2760 - protein, 16 aa, synthetic construct
TEVGHDSPHKSGQNQQ

SEQ ID NO: 2761 - protein, 16 aa, synthetic construct
SELGHDSPHKSGQNQQ

SEQ ID NO: 2762 - protein, 16 aa, synthetic construct
TINGHDSPHKSGQSVP

SEQ ID NO: 2763 - protein, 16 aa, synthetic construct
TINGHESPHKSGQNIQ

SEQ ID NO: 2764 - protein, 16 aa, synthetic construct
TINGHDSPHKSVQNHL

SEQ ID NO: 2765 - protein, 16 aa, synthetic construct
TINGHDSPHKIGLDQQ

SEQ ID NO: 2766 - protein, 16 aa, synthetic construct
TSNASGSPHSKAQHQQ

SEQ ID NO: 2767 - protein, 16 aa, synthetic construct
TINGHDSPHKRGPDQQ

SEQ ID NO: 2768 - protein, 16 aa, synthetic construct
TINGMGSPHSKTQNQQ

SEQ ID NO: 2769 - protein, 16 aa, synthetic construct
TIKGHDSPHKSGESQQ

SEQ ID NO: 2770 - protein, 16 aa, synthetic construct
TINGHDSPHKHGQNHQ

SEQ ID NO: 2771 - protein, 16 aa, synthetic construct
TVNGTGSPHSKAQNQL

SEQ ID NO: 2772 - protein, 16 aa, synthetic construct
TIIGHDSPHKSGQYQH

SEQ ID NO: 2773 - protein, 16 aa, synthetic construct
TSNGHDSPHKSVQNKQ

SEQ ID NO: 2774 - protein, 16 aa, synthetic construct
IVNGQVSPHKSGQNQQ

SEQ ID NO: 2775 - protein, 16 aa, synthetic construct
TVNGHDSPHKSGQRQL

SEQ ID NO: 2776 - protein, 16 aa, synthetic construct
TVNGHDSPHKIGQNQL

SEQ ID NO: 2777 - protein, 16 aa, synthetic construct
TINGHDSPHKSGQIIV

SEQ ID NO: 2778 - protein, 16 aa, synthetic construct
IGNGHESPHKSGQNQQ

SEQ ID NO: 2779 - protein, 16 aa, synthetic construct
EVMGHDSPHKSGQNQQ

SEQ ID NO: 2780 - protein, 16 aa, synthetic construct
TINGYDSPHKSGQKQS

SEQ ID NO: 2781 - protein, 16 aa, synthetic construct
TIHGNGSPHSKAQNQE

SEQ ID NO: 2782 - protein, 16 aa, synthetic construct
YQVGHDSPHKSGQNQQ

SEQ ID NO: 2783 - protein, 16 aa, synthetic construct
TIKGDDSPHKSVQNQQ

SEQ ID NO: 2784 - protein, 16 aa, synthetic construct
TINGHDSPHKSVQSHQ

SEQ ID NO: 2785 - protein, 16 aa, synthetic construct
TINGHDSPHKSGQFVV

SEQ ID NO: 2786 - protein, 16 aa, synthetic construct
TVNGHDSPHKSRQNLQ

SEQ ID NO: 2787 - protein, 16 aa, synthetic construct
ATNGHNSPHKSGQNQE

SEQ ID NO: 2788 - protein, 16 aa, synthetic construct
AINGHDSPHKSAQNQQ

SEQ ID NO: 2789 - protein, 16 aa, synthetic construct
TEHGHDSPHKSGQNQQ

SEQ ID NO: 2790 - protein, 16 aa, synthetic construct
TIYGHDSPHKSGQSQP

SEQ ID NO: 2791 - protein, 16 aa, synthetic construct
TISGHESPHKSGQNEQ

SEQ ID NO: 2792 - protein, 16 aa, synthetic construct
AIIGHDSPHKSAQNQQ

SEQ ID NO: 2793 - protein, 16 aa, synthetic construct
AIDGHDSPHKSGQNQL

SEQ ID NO: 2794 - protein, 16 aa, synthetic construct
TIMGHDSPHKSVQNQQ

SEQ ID NO: 2795 - protein, 16 aa, synthetic construct
EVGGHDSPHKSGQNQQ

SEQ ID NO: 2796 - protein, 16 aa, synthetic construct
TINGHDSPHKSAQNLL

SEQ ID NO: 2797 - protein, 16 aa, synthetic construct
TINASGSPHSKAINQQ

SEQ ID NO: 2798 - protein, 16 aa, synthetic construct
AINGNGSPHKRGQNQQ

SEQ ID NO: 2799 - protein, 16 aa, synthetic construct
SEMGHDSPHKSGQNQQ

SEQ ID NO: 2800 - protein, 16 aa, synthetic construct
AQQGHDSPHKSGQNQQ

SEQ ID NO: 2801 - protein, 16 aa, synthetic construct
AINGHDSPHKSGQSLQ

SEQ ID NO: 2802 - protein, 16 aa, synthetic construct
TINGSGSPHSKAPNQQ

SEQ ID NO: 2803 - protein, 16 aa, synthetic construct
CGEGHDSPHKSGQNQQ

SEQ ID NO: 2804 - protein, 16 aa, synthetic construct
TVNGHDSPHKSAQNHQ

SEQ ID NO: 2805 - protein, 16 aa, synthetic construct
TVNGHDSPHKSGQTQL

SEQ ID NO: 2806 - protein, 16 aa, synthetic construct
TNNGHDSPHKSGRNRQ

SEQ ID NO: 2807 - protein, 16 aa, synthetic construct
TINGHDSPHKYGQNEQ

SEQ ID NO: 2808 - protein, 16 aa, synthetic construct
TINGNGSPHSKAPNLQ

SEQ ID NO: 2809 - protein, 16 aa, synthetic construct
SINGHDSPHKSQQNQQ

SEQ ID NO: 2810 - protein, 16 aa, synthetic construct
TIGGHDSPHKSGQNQQ

SEQ ID NO: 2811 - protein, 16 aa, synthetic construct
TINGHDSPHKSVQSKQ

SEQ ID NO: 2812 - protein, 16 aa, synthetic construct
ELVGHDSPHKSGQNQQ

SEQ ID NO: 2813 - protein, 16 aa, synthetic construct
ELMGHDSPHKSGQNQQ

SEQ ID NO: 2814 - protein, 16 aa, synthetic construct
TINGNDSPHKIGHNQQ

SEQ ID NO: 2815 - protein, 16 aa, synthetic construct
TIKGGGSPHSKAQDQQ

SEQ ID NO: 2816 - protein, 16 aa, synthetic construct
TVNGHDSPHKSGQTQQ

SEQ ID NO: 2817 - protein, 16 aa, synthetic construct
TINGQDSPHKSGQNPL

SEQ ID NO: 2818 - protein, 16 aa, synthetic construct
TVNASGSPHSKAQNHQ

SEQ ID NO: 2819 - protein, 16 aa, synthetic construct
TINGHDSPHKSGRDQK

SEQ ID NO: 2820 - protein, 16 aa, synthetic construct
TINGHDSPHKSVHNQQ

SEQ ID NO: 2821 - protein, 16 aa, synthetic construct
TINGHDSPHKSGQWKR

SEQ ID NO: 2822 - protein, 16 aa, synthetic construct
TIDGSGSPHSKAENRQ

SEQ ID NO: 2823 - protein, 16 aa, synthetic construct
NEIGHDSPHKSGQNQQ

SEQ ID NO: 2824 - protein, 16 aa, synthetic construct
AINGHDSPHKSGQSQQ

SEQ ID NO: 2825 - protein, 16 aa, synthetic construct
IINGHDSPHKSRQAQQ

SEQ ID NO: 2826 - protein, 16 aa, synthetic construct
TPNGHDSPHKSGQNQQ

SEQ ID NO: 2827 - protein, 16 aa, synthetic construct
ITNGHDSPHKSGQTQQ

SEQ ID NO: 2828 - protein, 16 aa, synthetic construct
TINGHDSPHKSVQNHQ

SEQ ID NO: 2829 - protein, 16 aa, synthetic construct
TINGHDSPHKSKQNQQ

SEQ ID NO: 2830 - protein, 16 aa, synthetic construct
TINGHDSPHKSAQNQL

SEQ ID NO: 2831 - protein, 16 aa, synthetic construct
TVNGHDSPHKSGQTQP

SEQ ID NO: 2832 - protein, 16 aa, synthetic construct
TDQGHDSPHKSGQNQQ

SEQ ID NO: 2833 - protein, 16 aa, synthetic construct
TINGHDSPHKLWINQQ

SEQ ID NO: 2834 - protein, 16 aa, synthetic construct
GINGPDSPHKSGQNQQ

SEQ ID NO: 2835 - protein, 16 aa, synthetic construct
SEIGHDSPHKSGQNQQ

SEQ ID NO: 2836 - protein, 16 aa, synthetic construct
TINGHDSPHKSVQKQL

SEQ ID NO: 2837 - protein, 16 aa, synthetic construct
TINGHPSPHWKGQNQQ

SEQ ID NO: 2838 - protein, 16 aa, synthetic construct
TVNGHDSPHKSGRNQL

SEQ ID NO: 2839 - protein, 16 aa, synthetic construct
TIKGSGSPHSKVQDQQ

SEQ ID NO: 2840 - protein, 16 aa, synthetic construct
SEKGHDSPHKSGQNQQ

SEQ ID NO: 2841 - protein, 16 aa, synthetic construct
WSAGHDSPHKSGQNQQ

SEQ ID NO: 2842 - protein, 16 aa, synthetic construct
ELAGHDSPHKSGQNQQ

SEQ ID NO: 2843 - protein, 16 aa, synthetic construct
TINGHDSPHKMGRNQQ

SEQ ID NO: 2844 - protein, 16 aa, synthetic construct
TINGHDSPHKSGISIQ

SEQ ID NO: 2845 - protein, 16 aa, synthetic construct
TSNGHDSPHKSVQNLQ

SEQ ID NO: 2846 - protein, 16 aa, synthetic construct
QTQGHDSPHKSGQNQQ

SEQ ID NO: 2847 - protein, 16 aa, synthetic construct
TINGHDSPHKMAHNQQ

SEQ ID NO: 2848 - protein, 16 aa, synthetic construct
AINGSGSPHSKAQTQQ

SEQ ID NO: 2849 - protein, 16 aa, synthetic construct
TINGHDSPHKHGQNQQ

SEQ ID NO: 2850 - protein, 16 aa, synthetic construct
GADGHDSPHKSGQNQQ

SEQ ID NO: 2851 - protein, 16 aa, synthetic construct
VGEGHDSPHKSGQNQQ

SEQ ID NO: 2852 - protein, 16 aa, synthetic construct
ANEGHDSPHKSGQNQQ

SEQ ID NO: 2853 - protein, 16 aa, synthetic construct
TEAKSGSPHSKAQNQQ

SEQ ID NO: 2854 - protein, 16 aa, synthetic construct
TINGHDSPHKSVQSQQ

SEQ ID NO: 2855 - protein, 16 aa, synthetic construct
TIPGSGSPHSKAQNLQ

SEQ ID NO: 2856 - protein, 16 aa, synthetic construct
TINGHDSPHKSGQTVC

SEQ ID NO: 2857 - protein, 16 aa, synthetic construct
ELRGHDSPHKSGQNQQ

SEQ ID NO: 2858 - protein, 16 aa, synthetic construct
CQIGHDSPHKSGQNQQ

SEQ ID NO: 2859 - protein, 16 aa, synthetic construct
GVMGHDSPHKSGQNQQ

SEQ ID NO: 2860 - protein, 16 aa, synthetic construct
ACDGHDSPHKSGQNQQ

SEQ ID NO: 2861 - protein, 16 aa, synthetic construct
TINGQDSPHKSGQYQQ

SEQ ID NO: 2862 - protein, 16 aa, synthetic construct
TINGHDSPHKSGQQIM

SEQ ID NO: 2863 - protein, 16 aa, synthetic construct
TINGHDSPHKSRQNEQ

SEQ ID NO: 2864 - protein, 16 aa, synthetic construct
ASNGHDSPHKSGLNHQ

SEQ ID NO: 2865 - protein, 16 aa, synthetic construct
TVNGHDSPHKSGQSQP

SEQ ID NO: 2866 - protein, 16 aa, synthetic construct
NELGHDSPHKSGQNQQ

SEQ ID NO: 2867 - protein, 16 aa, synthetic construct
AAEGHDSPHKSGQNQQ

SEQ ID NO: 2868 - protein, 16 aa, synthetic construct
GQNGHDSPHKSGQNQQ

SEQ ID NO: 2869 - protein, 16 aa, synthetic construct
NEFGHDSPHKSGQNQQ

SEQ ID NO: 2870 - protein, 16 aa, synthetic construct
TSIGYDSPHKSGQNQQ

SEQ ID NO: 2871 - protein, 16 aa, synthetic construct
TDNGHDSPHKSGQNLQ

SEQ ID NO: 2872 - protein, 16 aa, synthetic construct
TITGHDSPHKSRQDQQ

SEQ ID NO: 2873 - protein, 16 aa, synthetic construct
AEHGHDSPHKSGQNQQ

SEQ ID NO: 2874 - protein, 16 aa, synthetic construct
TINGDDSPHKSGQKQL

SEQ ID NO: 2875 - protein, 16 aa, synthetic construct
EILGHDSPHKSGQNQQ

SEQ ID NO: 2876 - protein, 16 aa, synthetic construct
TIHGSGSPHSKAQNQA

SEQ ID NO: 2877 - protein, 16 aa, synthetic construct
AINGDDSPHKSGHNQQ

SEQ ID NO: 2878 - protein, 16 aa, synthetic construct
TSNGHNSPHKSGQNQE

SEQ ID NO: 2879 - protein, 16 aa, synthetic construct
TINGHDSPHKSGQMIH

SEQ ID NO: 2880 - protein, 16 aa, synthetic construct
NAIGHDSPHKSGQNQQ

SEQ ID NO: 2881 - protein, 16 aa, synthetic construct
VINGHDSPHKSGRNHQ

SEQ ID NO: 2882 - protein, 16 aa, synthetic construct
TITGHDSPHKSVQNRQ

SEQ ID NO: 2883 - protein, 16 aa, synthetic construct
TINGHDSPHKSGQKMN

SEQ ID NO: 2884 - protein, 16 aa, synthetic construct
TIHGHDSPHKSGQSQQ

SEQ ID NO: 2885 - protein, 16 aa, synthetic construct
TEIGHDSPHKSGQNQQ

SEQ ID NO: 2886 - protein, 16 aa, synthetic construct
TINGHDSPHKSGQYQH

SEQ ID NO: 2887 - protein, 14 aa, synthetic construct
GSGSPHSKAQNRHT

SEQ ID NO: 2888 - protein, 14 aa, synthetic construct
GSGSPHSKVQNQQT

SEQ ID NO: 2889 - protein, 14 aa, synthetic construct
MSGSPHSKAQNQQT

SEQ ID NO: 2890 - protein, 14 aa, synthetic construct
GSGSPHSKARDQQT

SEQ ID NO: 2891 - protein, 14 aa, synthetic construct
GSGSPHSKAPNLQT

SEQ ID NO: 2892 - protein, 14 aa, synthetic construct
TSGSPHSKAQNQQT

SEQ ID NO: 2893 - protein, 14 aa, synthetic construct
GSGSPHSKAHVRQT

SEQ ID NO: 2894 - protein, 14 aa, synthetic construct
GSGSPHSKAPNQHT

SEQ ID NO: 2895 - protein, 14 aa, synthetic construct
ISGSPHSKAQNQQT

SEQ ID NO: 2896 - protein, 14 aa, synthetic construct
GSGSPHSKTQSQQT

SEQ ID NO: 2897 - skipped

SEQ ID NO: 2898 - protein, 14 aa, synthetic construct
ESGSPHSKAQNQQI

SEQ ID NO: 2899 - protein, 14 aa, synthetic construct
GSGSPHSKAQPAKT

SEQ ID NO: 2900 - protein, 14 aa, synthetic construct
SSGSPHSKAQNQQT

SEQ ID NO: 2901 - protein, 14 aa, synthetic construct
GSGSPHSKSQTQQN

SEQ ID NO: 2902 - protein, 14 aa, synthetic construct
ASGSPHSKAQNQQT

SEQ ID NO: 2903 - protein, 14 aa, synthetic construct
GSGSPHSKAQNLAT

SEQ ID NO: 2904 - protein, 14 aa, synthetic construct
GSGSPHSKSQNQLT

SEQ ID NO: 2905 - protein, 14 aa, synthetic construct
NSGSPHSKAQNQQT

SEQ ID NO: 2906 - protein, 14 aa, synthetic construct
GSGSPHSKAQGQQT

SEQ ID NO: 2907 - protein, 14 aa, synthetic construct
VSGSPHSKAQNQQT

SEQ ID NO: 2908 - protein, 14 aa, synthetic construct
GSGSPHSKALNRQS

SEQ ID NO: 2909 - protein, 14 aa, synthetic construct
LSGSPHSKAQNQQT

SEQ ID NO: 2910 - protein, 14 aa, synthetic construct
GSGSPHSKAHNQQT

SEQ ID NO: 2911 - protein, 14 aa, synthetic construct
GSGSPHSKTQNQQT

SEQ ID NO: 2912 - protein, 14 aa, synthetic construct
GSGSPHSKAQNPPT

SEQ ID NO: 2913 - protein, 14 aa, synthetic construct
GSGSPHSKAQNLQT

SEQ ID NO: 2914 - protein, 14 aa, synthetic construct
GSGSPHSKAQYQQT

SEQ ID NO: 2915 - protein, 14 aa, synthetic construct
GSGSPHSKAQDQET

SEQ ID NO: 2916 - protein, 14 aa, synthetic construct
KSGSPHSKAQNQQT

SEQ ID NO: 2917 - protein, 14 aa, synthetic construct
GSGSPHSKAQNHQT

SEQ ID NO: 2918 - protein, 14 aa, synthetic construct
GSGSPHSKAQDQQT

SEQ ID NO: 2919 - protein, 14 aa, synthetic construct
GSGSPHSKGHWQQT

SEQ ID NO: 2920 - protein, 14 aa, synthetic construct
GSGSPHSKAPNQQT

SEQ ID NO: 2921 - protein, 14 aa, synthetic construct
GSGSPHSKAQNQLI

SEQ ID NO: 2922 - protein, 14 aa, synthetic construct
GSGSPHSKRPEQQT

SEQ ID NO: 2923 - protein, 14 aa, synthetic construct
GSGSPHSKAQRTMT

SEQ ID NO: 2924 - protein, 14 aa, synthetic construct
GSGSPHSKAQNQQH

SEQ ID NO: 2925 - protein, 14 aa, synthetic construct
HSGSPHSKAQNQQT

SEQ ID NO: 2926 - protein, 14 aa, synthetic construct
GSGSPHSKALHQHT

SEQ ID NO: 2927 - protein, 14 aa, synthetic construct
GSGSPHSKAQHRIT

SEQ ID NO: 2928 - protein, 14 aa, synthetic construct
GSGSPHSKAQYIHT

SEQ ID NO: 2929 - protein, 14 aa, synthetic construct
GSGSPHSKAQKFET

SEQ ID NO: 2930 - protein, 14 aa, synthetic construct
ESGSPHSKAQNHQT

SEQ ID NO: 2931 - protein, 14 aa, synthetic construct
GSGSPHSKAQFPST

SEQ ID NO: 2932 - protein, 14 aa, synthetic construct
PSGSPHSKAQNQQT

SEQ ID NO: 2933 - protein, 14 aa, synthetic construct
GSGSPHSKAHNQQR

SEQ ID NO: 2934 - protein, 14 aa, synthetic construct
GSGSPHSKAQAIKT

SEQ ID NO: 2935 - protein, 14 aa, synthetic construct
GSGSPHSKGQNRQT

SEQ ID NO: 2936 - protein, 14 aa, synthetic construct
GSGSPHSKAQSQQT

SEQ ID NO: 2937 - protein, 14 aa, synthetic construct
ASGSPHSKAQNQLT

SEQ ID NO: 2938 - protein, 14 aa, synthetic construct
RSGSPHSKAQNQQT

SEQ ID NO: 2939 - protein, 14 aa, synthetic construct
GSGSPHSKAQYQHT

SEQ ID NO: 2940 - protein, 14 aa, synthetic construct
GSGSPHTKAQNPQS

SEQ ID NO: 2941 - protein, 14 aa, synthetic construct
GSGSPHSKGQNPPT

SEQ ID NO: 2942 - protein, 14 aa, synthetic construct
GSGSPHSKAQHQLT

SEQ ID NO: 2943 - protein, 14 aa, synthetic construct
GSGSPHSKAQSPPT

SEQ ID NO: 2944 - protein, 14 aa, synthetic construct
GSGSPHSKAQAKLT

SEQ ID NO: 2945 - protein, 14 aa, synthetic construct
GSGSPHSKTKSQQT

SEQ ID NO: 2946 - protein, 14 aa, synthetic construct
GSGSPHSKAQDRPT

SEQ ID NO: 2947 - protein, 14 aa, synthetic construct
GSGSPHSKAQSQQL

SEQ ID NO: 2948 - protein, 14 aa, synthetic construct
GSGSPHSKAQAFHT

SEQ ID NO: 2949 - protein, 14 aa, synthetic construct
GSGSPHSKAQKQQD

SEQ ID NO: 2950 - protein, 14 aa, synthetic construct
GSGSPHSKAQNAQT

SEQ ID NO: 2951 - protein, 14 aa, synthetic construct
WSGSPHSKAQNQQT

SEQ ID NO: 2952 - protein, 14 aa, synthetic construct
GSGSPHSKAHNQLT

SEQ ID NO: 2953 - protein, 14 aa, synthetic construct
GSGSPHSKAQNQQY

SEQ ID NO: 2954 - protein, 14 aa, synthetic construct
GSGSPHSKAQKLNT

SEQ ID NO: 2955 - protein, 14 aa, synthetic construct
GSGSPHSKSQNVQT

SEQ ID NO: 2956 - protein, 14 aa, synthetic construct
GSGSPHSKAQAQQT

SEQ ID NO: 2957 - protein, 14 aa, synthetic construct
GSGSPHSKAQNLQA

SEQ ID NO: 2958 - protein, 14 aa, synthetic construct
DSGSPHSKAQNQQT

SEQ ID NO: 2959 - protein, 14 aa, synthetic construct
ASGSPHSKAPNQQT

SEQ ID NO: 2960 - protein, 14 aa, synthetic construct
GSGSPHSKAQTPPT

SEQ ID NO: 2961 - protein, 14 aa, synthetic construct
GSGSPHSKAQYQHA

SEQ ID NO: 2962 - protein, 14 aa, synthetic construct
GSGSPHSKAQGQQA

SEQ ID NO: 2963 - protein, 14 aa, synthetic construct
GSGSPHNKAQNHQT

SEQ ID NO: 2964 - protein, 14 aa, synthetic construct
GSGSPHSKAQPPAT

SEQ ID NO: 2965 - protein, 14 aa, synthetic construct
GSGSPHSKAQERPT

SEQ ID NO: 2966 - protein, 14 aa, synthetic construct
GSGSPHSKAQDLQT

SEQ ID NO: 2967 - protein, 14 aa, synthetic construct
GSGSPHSKAQAMHT

SEQ ID NO: 2968 - protein, 14 aa, synthetic construct
GSGSPHSKALNQQT

SEQ ID NO: 2969 - protein, 14 aa, synthetic construct
GSGSPHSKAQHPST

SEQ ID NO: 2970 - protein, 14 aa, synthetic construct
GSGSPHSKAPGLQT

SEQ ID NO: 2971 - protein, 14 aa, synthetic construct
GSGSPHSKAQGIRT

SEQ ID NO: 2972 - protein, 14 aa, synthetic construct
GSGSPHSKAQAPAT

SEQ ID NO: 2973 - protein, 14 aa, synthetic construct
GSGSPHSKSQSQQI

SEQ ID NO: 2974 - protein, 14 aa, synthetic construct
GSGSPHSKAQIPPT

SEQ ID NO: 2975 - protein, 14 aa, synthetic construct
GSGSPHSKAQTQLT

SEQ ID NO: 2976 - protein, 14 aa, synthetic construct
GSGSPHSKAQAPST

SEQ ID NO: 2977 - protein, 14 aa, synthetic construct
GSGSPHSKGQNQQT

SEQ ID NO: 2978 - protein, 14 aa, synthetic construct
ASGSPHSKAHNQQT

SEQ ID NO: 2979 - protein, 14 aa, synthetic construct
GSGSPHSKAQNTYA

SEQ ID NO: 2980 - protein, 14 aa, synthetic construct
GSGSPHSKSQNQHI

SEQ ID NO: 2981 - protein, 14 aa, synthetic construct
GSGSPHSKAQNHLT

SEQ ID NO: 2982 - protein, 14 aa, synthetic construct
GSGSPHSKAQIGMT

SEQ ID NO: 2983 - protein, 14 aa, synthetic construct
GSGSPHSKALNKQT

SEQ ID NO: 2984 - protein, 14 aa, synthetic construct
GSGSPHSKAQLQQT

SEQ ID NO: 2985 - protein, 14 aa, synthetic construct
GSGSPHSKAQRMST

SEQ ID NO: 2986 - protein, 14 aa, synthetic construct
GSGSPHSKAQGILT

SEQ ID NO: 2987 - protein, 14 aa, synthetic construct
GSGSPHSKAQDRQT

SEQ ID NO: 2988 - protein, 14 aa, synthetic construct
GSGSPHSKARDWQT

SEQ ID NO: 2989 - protein, 14 aa, synthetic construct
GSGSPHSKAQNTHD

SEQ ID NO: 2990 - protein, 14 aa, synthetic construct
GSGSPHSKAPNLQI

SEQ ID NO: 2991 - protein, 14 aa, synthetic construct
GSGSPHSKAQERST

SEQ ID NO: 2992 - protein, 14 aa, synthetic construct
GSGSPHSKAQNYQT

SEQ ID NO: 2993 - protein, 14 aa, synthetic construct
GSGSPHSKAQRTCT

SEQ ID NO: 2994 - protein, 14 aa, synthetic construct
GSGSPHSKAQIGHT

SEQ ID NO: 2995 - protein, 14 aa, synthetic construct
GSGSPHSKAQGAIT

SEQ ID NO: 2996 - protein, 14 aa, synthetic construct
GSGSPHSKAQVPPT

SEQ ID NO: 2997 - protein, 14 aa, synthetic construct
GSGSPHSKAQVQQI

SEQ ID NO: 2998 - protein, 14 aa, synthetic construct
GSGSPHSKALMRQT

SEQ ID NO: 2999 - protein, 14 aa, synthetic construct
GSGSPHSKAQYSVT

SEQ ID NO: 3000 - protein, 14 aa, synthetic construct
GSGSPHSKVPNLQT

SEQ ID NO: 3001 - protein, 14 aa, synthetic construct
GSGSPHSKAQSQQI

SEQ ID NO: 3002 - protein, 14 aa, synthetic construct
GSGSPHSKAQAITT

SEQ ID NO: 3003 - protein, 14 aa, synthetic construct
GSGSPHSKAQKTLT

SEQ ID NO: 3004 - protein, 14 aa, synthetic construct
GSGSPHSKAQNQWT

SEQ ID NO: 3005 - protein, 14 aa, synthetic construct
GSGSPHSKAQLHHT

SEQ ID NO: 3006 - protein, 14 aa, synthetic construct
GSGSPHSKAQNIII

SEQ ID NO: 3007 - protein, 14 aa, synthetic construct
GSGSPHSKAQGHHT

SEQ ID NO: 3008 - protein, 14 aa, synthetic construct
GSGSPHSKAQSKVT

SEQ ID NO: 3009 - protein, 14 aa, synthetic construct
GSGSPHSKAQLPST

SEQ ID NO: 3010 - protein, 14 aa, synthetic construct
GSGSPHSKAIGKQT

SEQ ID NO: 3011 - protein, 14 aa, synthetic construct
GSGSPHSKAQAIHT

SEQ ID NO: 3012 - protein, 14 aa, synthetic construct
GSGSPHSKAQHGLT

SEQ ID NO: 3013 - protein, 14 aa, synthetic construct
GSGSPHSKAQFMCT

SEQ ID NO: 3014 - protein, 14 aa, synthetic construct
VSGSPHSKAQGQQT

SEQ ID NO: 3015 - protein, 14 aa, synthetic construct
GSGSPHSKAQHLQT

SEQ ID NO: 3016 - protein, 14 aa, synthetic construct
GSGSPHSKTQNHQN

SEQ ID NO: 3017 - protein, 14 aa, synthetic construct
GSGSPHSKAQPART

SEQ ID NO: 3018 - protein, 14 aa, synthetic construct
GSGSPHSKAQSLQT

SEQ ID NO: 3019 - protein, 14 aa, synthetic construct
GSGSPHSKSQSQLT

SEQ ID NO: 3020 - protein, 14 aa, synthetic construct
GSGSPHSKAQDRQS

SEQ ID NO: 3021 - protein, 14 aa, synthetic construct
GSGSPHSKAQMPST

SEQ ID NO: 3022 - protein, 14 aa, synthetic construct
GSGSPHSKAQGSLT

SEQ ID NO: 3023 - protein, 14 aa, synthetic construct
GSGSPHSKSQNQQT

SEQ ID NO: 3024 - protein, 14 aa, synthetic construct
GSGSPHSKAQVPAT

SEQ ID NO: 3025 - protein, 14 aa, synthetic construct
GSGSPHSKAQDKQT

SEQ ID NO: 3026 - protein, 14 aa, synthetic construct
GSGSPHSKAHYQQT

SEQ ID NO: 3027 - protein, 14 aa, synthetic construct
GSGSPHSKAQVPST

SEQ ID NO: 3028 - protein, 14 aa, synthetic construct
GSGSPHSKARGEQT

SEQ ID NO: 3029 - protein, 14 aa, synthetic construct
GSGSPHSKAPGQQT

SEQ ID NO: 3030 - protein, 14 aa, synthetic construct
GSGSPHSKAQSLQI

SEQ ID NO: 3031 - protein, 14 aa, synthetic construct
GSGSPHSKRLEQQT

SEQ ID NO: 3032 - protein, 14 aa, synthetic construct
GSGSPHSKAQNQST

SEQ ID NO: 3033 - protein, 14 aa, synthetic construct
GSGSPHSKAQKVIT

SEQ ID NO: 3034 - protein, 14 aa, synthetic construct
GSGSPHSKAQNNDQ

SEQ ID NO: 3035 - protein, 14 aa, synthetic construct
GSGSPHSKAQSVHT

SEQ ID NO: 3036 - protein, 14 aa, synthetic construct
GSGSPHSKAQPLGT

SEQ ID NO: 3037 - protein, 14 aa, synthetic construct
GSGSPHSKAHNQET

SEQ ID NO: 3038 - protein, 14 aa, synthetic construct
GSGSPHSKAQNLQI

SEQ ID NO: 3039 - protein, 14 aa, synthetic construct
GSGSPHSKAQIQQT

SEQ ID NO: 3040 - protein, 14 aa, synthetic construct
GSGSPHSKAQVRNT

SEQ ID NO: 3041 - protein, 14 aa, synthetic construct
GSGSPHSKAPSNQT

SEQ ID NO: 3042 - protein, 14 aa, synthetic construct
GSGSPHSKAQVGHT

SEQ ID NO: 3043 - protein, 14 aa, synthetic construct
GSGSPHSKAQRDIT

SEQ ID NO: 3044 - protein, 14 aa, synthetic construct
GSGSPHSKAQMPNT

SEQ ID NO: 3045 - protein, 14 aa, synthetic construct
GSGSPHSKARGLQT

SEQ ID NO: 3046 - protein, 14 aa, synthetic construct
GSGSPHSKLQKQQT

SEQ ID NO: 3047 - protein, 14 aa, synthetic construct
GSGSPHSKAPSLQT

SEQ ID NO: 3048 - protein, 14 aa, synthetic construct
GSGSPHSKAQRDQT

SEQ ID NO: 3049 - protein, 14 aa, synthetic construct
GSGSPHSKNRDQQT

SEQ ID NO: 3050 - protein, 14 aa, synthetic construct
GSGSPHSKAQAKGT

SEQ ID NO: 3051 - protein, 14 aa, synthetic construct
GSGSPHSKAQSAHT

SEQ ID NO: 3052 - protein, 14 aa, synthetic construct
GSGSPHSKSQNHQT

SEQ ID NO: 3053 - protein, 14 aa, synthetic construct
RSGSPHSKAQDQQT

SEQ ID NO: 3054 - protein, 14 aa, synthetic construct
GSGSPHSKAQSTMT

SEQ ID NO: 3055 - protein, 14 aa, synthetic construct
GSGSPHSKAQREMT

SEQ ID NO: 3056 - protein, 14 aa, synthetic construct
GSGSPHSKAQYRAT

SEQ ID NO: 3057 - protein, 14 aa, synthetic construct
GSGSPHSKNQWQQT

SEQ ID NO: 3058 - protein, 14 aa, synthetic construct
GSGSPHSKAQRMNT

SEQ ID NO: 3059 - protein, 14 aa, synthetic construct
GSGSPHAKAQNHQT

SEQ ID NO: 3060 - protein, 14 aa, synthetic construct
GSGSPHSKAGDSQT

SEQ ID NO: 3061 - protein, 14 aa, synthetic construct
GSGSPHSKLKSQQT

SEQ ID NO: 3062 - protein, 14 aa, synthetic construct
GSGSPHSKAQKIST

SEQ ID NO: 3063 - protein, 14 aa, synthetic construct
GSGSPHSKAPSMQT

SEQ ID NO: 3064 - protein, 14 aa, synthetic construct
GSGSPHSKASPRQT

SEQ ID NO: 3065 - protein, 14 aa, synthetic construct
GSGSPHSKRMEQQT

SEQ ID NO: 3066 - protein, 14 aa, synthetic construct
GSGSPHSKAQYQNT

SEQ ID NO: 3067 - protein, 14 aa, synthetic construct
RSGSPHSKAQNQQI

SEQ ID NO: 3068 - protein, 14 aa, synthetic construct
GSGSPHTKAQNPPT

SEQ ID NO: 3069 - protein, 14 aa, synthetic construct
GSGSPHTKAQNQQT

SEQ ID NO: 3070 - protein, 14 aa, synthetic construct
ASGSPHSKAQHQQT

SEQ ID NO: 3071 - protein, 14 aa, synthetic construct
ASGSPHSKAINQQT

SEQ ID NO: 3072 - protein, 14 aa, synthetic construct
GSGSPHSKAPNQQH

SEQ ID NO: 3073 - protein, 14 aa, synthetic construct
ASGSPHSKAQNHQT

SEQ ID NO: 3074 - protein, 14 aa, synthetic construct
GSGSPHSKAENRQT

SEQ ID NO: 3075 - protein, 14 aa, synthetic construct
GSGSPHSKVQDQQT

SEQ ID NO: 3076 - protein, 14 aa, synthetic construct
GSGSPHSKAQTQQA

SEQ ID NO: 3077 - protein, 14 aa, synthetic construct
GSGSPHSKAQNQAT

SEQ ID NO: 3078 - protein, 14 aa, synthetic construct
GHDSPHKSGQIRQT

SEQ ID NO: 3079 - protein, 14 aa, synthetic construct
GHDSPHKIGQNQHA

SEQ ID NO: 3080 - protein, 14 aa, synthetic construct
GYDSPHKSGQKQQT

SEQ ID NO: 3081 - protein, 14 aa, synthetic construct
GHDSPHKSGQNQQT

SEQ ID NO: 3082 - protein, 14 aa, synthetic construct
GHDSPHKSGQSVQT

SEQ ID NO: 3083 - protein, 14 aa, synthetic construct
GHESPHKSGRSQQT

SEQ ID NO: 3084 - protein, 14 aa, synthetic construct
GHDSPHKSGQNKLE

SEQ ID NO: 3085 - protein, 14 aa, synthetic construct
GHDSPHKTGQNQQK

SEQ ID NO: 3086 - protein, 14 aa, synthetic construct
GRGSPHKRGQNQQT

SEQ ID NO: 3087 - protein, 14 aa, synthetic construct
GHDNPHKSGQNQQT

SEQ ID NO: 3088 - protein, 14 aa, synthetic construct
GQDSPHKSGQHQQA

SEQ ID NO: 3089 - protein, 14 aa, synthetic construct
GHDSPHKSGQIQHT

SEQ ID NO: 3090 - protein, 14 aa, synthetic construct
GHDSPHKSGPRQQT

SEQ ID NO: 3091 - protein, 14 aa, synthetic construct
GHDSPHKSGHTQQT

SEQ ID NO: 3092 - protein, 14 aa, synthetic construct
GHDSPHKSGQRQHT

SEQ ID NO: 3093 - protein, 14 aa, synthetic construct
GHDSPHKSAQSQQT

SEQ ID NO: 3094 - protein, 14 aa, synthetic construct
GHESPHKSGQNQQS

SEQ ID NO: 3095 - protein, 14 aa, synthetic construct
GHDSPHKSLQNQQT

SEQ ID NO: 3096 - protein, 14 aa, synthetic construct
GHDSPHKSGRNQET

SEQ ID NO: 3097 - protein, 14 aa, synthetic construct
GHDSPHKSGQTQLT

SEQ ID NO: 3098 - protein, 14 aa, synthetic construct
GHDSPHKSEKNQQT

SEQ ID NO: 3099 - protein, 14 aa, synthetic construct
GRDSPHKSGQDQQT

SEQ ID NO: 3100 - protein, 14 aa, synthetic construct
GHDSPHKTGHNQQT

SEQ ID NO: 3101 - protein, 14 aa, synthetic construct
AHDSPHKSGQNQLT

SEQ ID NO: 3102 - protein, 14 aa, synthetic construct
GYDSPHKSGQTQQT

SEQ ID NO: 3103 - protein, 14 aa, synthetic construct
GHESPHKSGQTQQI

SEQ ID NO: 3104 - protein, 14 aa, synthetic construct
GHDSPHKSGQSKQA

SEQ ID NO: 3105 - protein, 14 aa, synthetic construct
GHESPHKSGQNQQT

SEQ ID NO: 3106 - protein, 14 aa, synthetic construct
GHDSPHKTGQNQPP

SEQ ID NO: 3107 - protein, 14 aa, synthetic construct
GHDSPHKSGQSPQT

SEQ ID NO: 3108 - protein, 14 aa, synthetic construct
GNDSPHKSVQNQQT

SEQ ID NO: 3109 - protein, 14 aa, synthetic construct
GHDSPHKSAQNYQT

SEQ ID NO: 3110 - protein, 14 aa, synthetic construct
AHDSPHKIGQNHQT

SEQ ID NO: 3111 - protein, 14 aa, synthetic construct
GHESPHKSAQNRQT

SEQ ID NO: 3112 - protein, 14 aa, synthetic construct
GHDSPHKSGQNQQG

SEQ ID NO: 3113 - protein, 14 aa, synthetic construct
GQDSPHKIGQNQQT

SEQ ID NO: 3114 - protein, 14 aa, synthetic construct
GHDSPHKSGQNHLT

SEQ ID NO: 3115 - protein, 14 aa, synthetic construct
GHDSPHKSGQYQHT

SEQ ID NO: 3116 - protein, 14 aa, synthetic construct
GNDSPHKSVQNHQT

SEQ ID NO: 3117 - protein, 14 aa, synthetic construct
GHDSPHKSGQNQWT

SEQ ID NO: 3118 - protein, 14 aa, synthetic construct
GHDSPHKSVQNQHT

SEQ ID NO: 3119 - protein, 14 aa, synthetic construct
GHDSPHKSGQNQHA

SEQ ID NO: 3120 - protein, 14 aa, synthetic construct
GHDSPHKSGQTRQT

SEQ ID NO: 3121 - protein, 14 aa, synthetic construct
GHDSPHKSGQNLHT

SEQ ID NO: 3122 - protein, 14 aa, synthetic construct
GHDSPHKSGLNQQT

SEQ ID NO: 3123 - protein, 14 aa, synthetic construct
GHDSPHKSAQNQET

SEQ ID NO: 3124 - protein, 14 aa, synthetic construct
GHDSPHKSGQHLQT

SEQ ID NO: 3125 - protein, 14 aa, synthetic construct
GHDSPHKSRLNQPT

SEQ ID NO: 3126 - protein, 14 aa, synthetic construct
GHDSPHKSGQKQQT

SEQ ID NO: 3127 - protein, 14 aa, synthetic construct
GQDSPHKSGQNQDT

SEQ ID NO: 3128 - protein, 14 aa, synthetic construct
GHDSPHKSGRNQQT

SEQ ID NO: 3129 - protein, 14 aa, synthetic construct
GHDSPHKSGQNLLT

SEQ ID NO: 3130 - protein, 14 aa, synthetic construct
GHDSPHKSGQLVIT

SEQ ID NO: 3131 - protein, 14 aa, synthetic construct
GHDSPHKSRQSQQT

SEQ ID NO: 3132 - protein, 14 aa, synthetic construct
GHDSPHKSGRTQET

SEQ ID NO: 3133 - protein, 14 aa, synthetic construct
GHDSPHKSVQTHQT

SEQ ID NO: 3134 - protein, 14 aa, synthetic construct
GHDSPHKSGQNQPA

SEQ ID NO: 3135 - protein, 14 aa, synthetic construct
KHDSPHKSGQNQQT

SEQ ID NO: 3136 - protein, 14 aa, synthetic construct
GHDSPHKSGQTQQT

SEQ ID NO: 3137 - protein, 14 aa, synthetic construct
GPDSPHKIGQNQQS

SEQ ID NO: 3138 - protein, 14 aa, synthetic construct
GHDSPHKSVQNQQT

SEQ ID NO: 3139 - protein, 14 aa, synthetic construct
GHDSPHKSRQDQHT

SEQ ID NO: 3140 - protein, 14 aa, synthetic construct
GPDSPHKSGQKQQT

SEQ ID NO: 3141 - protein, 14 aa, synthetic construct
GHDSPHKSRQSQHT

SEQ ID NO: 3142 - protein, 14 aa, synthetic construct
GHDSPHKSVQNQLT

SEQ ID NO: 3143 - protein, 14 aa, synthetic construct
AHDSPHKSGQNQQT

SEQ ID NO: 3144 - protein, 14 aa, synthetic construct
GQDSPHKSGQNQQS

SEQ ID NO: 3145 - protein, 14 aa, synthetic construct
GHDSPHKSGRNQQI

SEQ ID NO: 3146 - protein, 14 aa, synthetic construct
GYDSPHKSGQYQHT

SEQ ID NO: 3147 - protein, 14 aa, synthetic construct
GHDSPHKSRQNQQT

SEQ ID NO: 3148 - protein, 14 aa, synthetic construct
GHDSPHKSWVRQQT

SEQ ID NO: 3149 - protein, 14 aa, synthetic construct
GHESPHKSGQNQHS

SEQ ID NO: 3150 - protein, 14 aa, synthetic construct
GHDSPHKIGHNQQT

SEQ ID NO: 3151 - protein, 14 aa, synthetic construct
WHDSPHKSGQNQQT

SEQ ID NO: 3152 - protein, 14 aa, synthetic construct
RHDSPHKSGQNQQT

SEQ ID NO: 3153 - protein, 14 aa, synthetic construct
GHDSPHKSNAWQQT

SEQ ID NO: 3154 - protein, 14 aa, synthetic construct
GHDSPHKSGQSVPT

SEQ ID NO: 3155 - protein, 14 aa, synthetic construct
GHESPHKSGQNIQP

SEQ ID NO: 3156 - protein, 14 aa, synthetic construct
GHDSPHKSVQNHLN

SEQ ID NO: 3157 - protein, 14 aa, synthetic construct
GHDSPHKIGLDQQT

SEQ ID NO: 3158 - protein, 14 aa, synthetic construct
GHDSPHKRGPDQQS

SEQ ID NO: 3159 - protein, 14 aa, synthetic construct
GHDSPHKSGESQQT

SEQ ID NO: 3160 - protein, 14 aa, synthetic construct
GHDSPHKHGQNHQT

SEQ ID NO: 3161 - protein, 14 aa, synthetic construct
LHDSPHKSGQNQQT

SEQ ID NO: 3162 - protein, 14 aa, synthetic construct
GHDSPHKSVQNKQT

SEQ ID NO: 3163 - protein, 14 aa, synthetic construct
GQVSPHKSGQNQQT

SEQ ID NO: 3164 - protein, 14 aa, synthetic construct
GHDSPHKSGQRQLT

SEQ ID NO: 3165 - protein, 14 aa, synthetic construct
GHDSPHKIGQNQLT

SEQ ID NO: 3166 - protein, 14 aa, synthetic construct
GHDSPHKSGQIIVT

SEQ ID NO: 3167 - protein, 14 aa, synthetic construct
IHDSPHKSGQNQQT

SEQ ID NO: 3168 - protein, 14 aa, synthetic construct
GYDSPHKSGQKQST

SEQ ID NO: 3169 - protein, 14 aa, synthetic construct
MHDSPHKSGQNQQT

SEQ ID NO: 3170 - protein, 14 aa, synthetic construct
GDDSPHKSVQNQQT

SEQ ID NO: 3171 - protein, 14 aa, synthetic construct
GHDSPHKSVQSHQT

SEQ ID NO: 3172 - protein, 14 aa, synthetic construct
GHDSPHKSGQFVVT

SEQ ID NO: 3173 - protein, 14 aa, synthetic construct
GHDSPHKSRQNLQT

SEQ ID NO: 3174 - protein, 14 aa, synthetic construct
GHNSPHKSGQNQET

SEQ ID NO: 3175 - protein, 14 aa, synthetic construct
GHDSPHKSAQNQQI

SEQ ID NO: 3176 - protein, 14 aa, synthetic construct
NHDSPHKSGQNQQT

SEQ ID NO: 3177 - protein, 14 aa, synthetic construct
GHDSPHKSGQSQPT

SEQ ID NO: 3178 - protein, 14 aa, synthetic construct
GHESPHKSGQNEQT

SEQ ID NO: 3179 - protein, 14 aa, synthetic construct
GHDSPHKSAQNQQT

SEQ ID NO: 3180 - protein, 14 aa, synthetic construct
GHDSPHKSGQNQLT

SEQ ID NO: 3181 - protein, 14 aa, synthetic construct
GHDSPHKSAQNLLT

SEQ ID NO: 3182 - protein, 14 aa, synthetic construct
THDSPHKSGQNQQT

SEQ ID NO: 3183 - protein, 14 aa, synthetic construct
GNGSPHKRGQNQQT

SEQ ID NO: 3184 - protein, 14 aa, synthetic construct
GHDSPHKSGQSLQT

SEQ ID NO: 3185 - protein, 14 aa, synthetic construct
GHDSPHKSAQNHQT

SEQ ID NO: 3186 - protein, 14 aa, synthetic construct
GHDSPHKSGRNRQT

SEQ ID NO: 3187 - protein, 14 aa, synthetic construct
EHDSPHKSGQNQQT

SEQ ID NO: 3188 - protein, 14 aa, synthetic construct
GHDSPHKYGQNEQT

SEQ ID NO: 3189 - protein, 14 aa, synthetic construct
RHDSPHKSGHNQQT

SEQ ID NO: 3190 - protein, 14 aa, synthetic construct
GHDSPHKSQQNQQT

SEQ ID NO: 3191 - protein, 14 aa, synthetic construct
GHDSPHKSGQNQQI

SEQ ID NO: 3192 - protein, 14 aa, synthetic construct
QHDSPHKSGQNQQT

SEQ ID NO: 3193 - protein, 14 aa, synthetic construct
RHDSPHKIVQNQQT

SEQ ID NO: 3194 - protein, 14 aa, synthetic construct
YHDSPHKSGQNQQT

SEQ ID NO: 3195 - protein, 14 aa, synthetic construct
GHDSPHKSVQSKQT

SEQ ID NO: 3196 - protein, 14 aa, synthetic construct
GNDSPHKIGHNQQT

SEQ ID NO: 3197 - protein, 14 aa, synthetic construct
HHDSPHKSGQNQQT

SEQ ID NO: 3198 - protein, 14 aa, synthetic construct
GHDSPHKSGQTQQI

SEQ ID NO: 3199 - protein, 14 aa, synthetic construct
GQDSPHKSGQNPLT

SEQ ID NO: 3200 - protein, 14 aa, synthetic construct
GHDSPHKSGRDQKT

SEQ ID NO: 3201 - protein, 14 aa, synthetic construct
GHDSPHKSVHNQQN

SEQ ID NO: 3202 - protein, 14 aa, synthetic construct
GHDSPHKSGQWKRT

SEQ ID NO: 3203 - protein, 14 aa, synthetic construct
GHDSPHKSGQSQQI

SEQ ID NO: 3204 - protein, 14 aa, synthetic construct
GHDSPHKSRQAQQT

SEQ ID NO: 3205 - protein, 14 aa, synthetic construct
GHDSPHKSVQNHQI

SEQ ID NO: 3206 - protein, 14 aa, synthetic construct
GHDSPHKSKQNQQA

SEQ ID NO: 3207 - protein, 14 aa, synthetic construct
GHDSPHKSAQNQLN

SEQ ID NO: 3208 - protein, 14 aa, synthetic construct
GHDSPHKSGQTQPT

SEQ ID NO: 3209 - protein, 14 aa, synthetic construct
FHDSPHKSGQNQQT

SEQ ID NO: 3210 - protein, 14 aa, synthetic construct
GHDSPHKLWINQQT

SEQ ID NO: 3211 - protein, 14 aa, synthetic construct
GPDSPHKSGQNQQT

SEQ ID NO: 3212 - protein, 14 aa, synthetic construct
GHDSPHKSVQKQLT

SEQ ID NO: 3213 - protein, 14 aa, synthetic construct
GHDSPHKSGRNQLA

SEQ ID NO: 3214 - protein, 14 aa, synthetic construct
VHDSPHKSGQNQQS

SEQ ID NO: 3215 - protein, 14 aa, synthetic construct
GHDSPHKMGRNQQS

SEQ ID NO: 3216 - protein, 14 aa, synthetic construct
GHDSPHKSGISIQT

SEQ ID NO: 3217 - protein, 14 aa, synthetic construct
VHDSPHKSGQNQQT

SEQ ID NO: 3218 - protein, 14 aa, synthetic construct
GHDSPHKSVQNLQT

SEQ ID NO: 3219 - protein, 14 aa, synthetic construct
GHDSPHKMAHNQQT

SEQ ID NO: 3220 - protein, 14 aa, synthetic construct
GHDSPHKHGQNQQN

SEQ ID NO: 3221 - protein, 14 aa, synthetic construct
GHDSPHKSVQSQQS

SEQ ID NO: 3222 - protein, 14 aa, synthetic construct
GHDSPHKSGQTVCT

SEQ ID NO: 3223 - protein, 14 aa, synthetic construct
GQDSPHKSGQYQQI

SEQ ID NO: 3224 - protein, 14 aa, synthetic construct
GHDSPHKSGQQIMT

SEQ ID NO: 3225 - protein, 14 aa, synthetic construct
GHDSPHKSRQNEQS

SEQ ID NO: 3226 - protein, 14 aa, synthetic construct
GHDSPHKSGLNHQT

SEQ ID NO: 3227 - protein, 14 aa, synthetic construct
GYDSPHKSGQNQQT

SEQ ID NO: 3228 - protein, 14 aa, synthetic construct
GHDSPHKSGQNLQT

SEQ ID NO: 3229 - protein, 14 aa, synthetic construct
GHDSPHKSRQDQQT

SEQ ID NO: 3230 - protein, 14 aa, synthetic construct
GDDSPHKSGQKQLT

SEQ ID NO: 3231 - protein, 14 aa, synthetic construct
GDDSPHKSGHNQQT

SEQ ID NO: 3232 - protein, 14 aa, synthetic construct
GHDSPHKSGQMIHT

SEQ ID NO: 3233 - protein, 14 aa, synthetic construct
GHDSPHKSGRNHQS

SEQ ID NO: 3234 - protein, 14 aa, synthetic construct
GHDSPHKSVQNRQT

SEQ ID NO: 3235 - protein, 14 aa, synthetic construct
GHDSPHKSGQKMNT

SEQ ID NO: 3236 - protein, 14 aa, synthetic construct
GHDSPHKSGQSQQN

SEQ ID NO: 3237 - protein, 14 aa, synthetic construct
GHDSPHKSGQYQHA

SEQ ID NO: 3238 - skipped

SEQ ID NO: 3239 - protein, 18 aa, synthetic construct
KTIIGSGSPHSKAQNRHT

SEQ ID NO: 3240 - protein, 18 aa, synthetic construct
KTFPGSGSPHSKVQNQQT

SEQ ID NO: 3241 - protein, 18 aa, synthetic construct
KTEKMSGSPHSKAQNQQT

SEQ ID NO: 3242 - protein, 18 aa, synthetic construct
KTVNGSGSPHSKARDQQT

SEQ ID NO: 3243 - protein, 18 aa, synthetic construct
KTFNGSGSPHSKAPNLQT

SEQ ID NO: 3244 - protein, 18 aa, synthetic construct
KTEKTSGSPHSKAQNQQT

SEQ ID NO: 3245 - protein, 18 aa, synthetic construct
KTINGSGSPHSKAHVRQT

SEQ ID NO: 3246 - protein, 18 aa, synthetic construct
KTVNGSGSPHSKAPNQHT

SEQ ID NO: 3247 - protein, 18 aa, synthetic construct
KTEKISGSPHSKAQNQQT

SEQ ID NO: 3248 - protein, 18 aa, synthetic construct
KTVNGSGSPHSKTQSQQT

SEQ ID NO: 3249 - protein, 18 aa, synthetic construct
TTINGSGSPHSKAQNQQT

SEQ ID NO: 3250 - protein, 18 aa, synthetic construct
KSINESGSPHSKAQNQQI

SEQ ID NO: 3251 - protein, 18 aa, synthetic construct
KTERTSGSPHSKAQNQQT

SEQ ID NO: 3252 - protein, 18 aa, synthetic construct
KTINGSGSPHSKAQPAKT

SEQ ID NO: 3253 - protein, 18 aa, synthetic construct
KTEKSSGSPHSKAQNQQT

SEQ ID NO: 3254 - protein, 18 aa, synthetic construct
KTEKGSGSPHSKAQNQQT

SEQ ID NO: 3255 - protein, 18 aa, synthetic construct
KTINGSGSPHSKSQTQQN

SEQ ID NO: 3256 - protein, 18 aa, synthetic construct
KTERISGSPHSKAQNQQT

SEQ ID NO: 3257 - protein, 18 aa, synthetic construct
KTERASGSPHSKAQNQQT

SEQ ID NO: 3258 - protein, 18 aa, synthetic construct
KELHGSGSPHSKAQNQQT

SEQ ID NO: 3259 - protein, 18 aa, synthetic construct
KAINGSGSPHSKAQNLAT

SEQ ID NO: 3260 - protein, 18 aa, synthetic construct
KTVNGSGSPHSKSQNQLT

SEQ ID NO: 3261 - protein, 18 aa, synthetic construct
KTERNSGSPHSKAQNQQT

SEQ ID NO: 3262 - protein, 18 aa, synthetic construct
KTFNGSGSPHSKAQGQQT

SEQ ID NO: 3263 - protein, 18 aa, synthetic construct
KTERVSGSPHSKAQNQQT

SEQ ID NO: 3264 - protein, 18 aa, synthetic construct
KTINGSGSPHSKALNRQS

SEQ ID NO: 3265 - protein, 18 aa, synthetic construct
KTERLSGSPHSKAQNQQT

SEQ ID NO: 3266 - protein, 18 aa, synthetic construct
KTDNGSGSPHSKAHNQQT

SEQ ID NO: 3267 - protein, 18 aa, synthetic construct
KTFHGSGSPHSKTQNQQT

SEQ ID NO: 3268 - protein, 18 aa, synthetic construct
KTSNGSGSPHSKAQNPPT

SEQ ID NO: 3269 - protein, 18 aa, synthetic construct
ETINGSGSPHSKAQNLQT

SEQ ID NO: 3270 - protein, 18 aa, synthetic construct
NTINGSGSPHSKAQNQQT

SEQ ID NO: 3271 - protein, 18 aa, synthetic construct
KTENMSGSPHSKAQNQQT

SEQ ID NO: 3272 - protein, 18 aa, synthetic construct
KTENVSGSPHSKAQNQQT

SEQ ID NO: 3273 - protein, 18 aa, synthetic construct
KTSSGSGSPHSKAQYQQT

SEQ ID NO: 3274 - protein, 18 aa, synthetic construct
KTEKVSGSPHSKAQNQQT

SEQ ID NO: 3275 - protein, 18 aa, synthetic construct
KAINGSGSPHSKAQDQET

SEQ ID NO: 3276 - protein, 18 aa, synthetic construct
KTCNKSGSPHSKAQNQQT

SEQ ID NO: 3277 - protein, 18 aa, synthetic construct
KTEHLSGSPHSKAQNQQT

SEQ ID NO: 3278 - protein, 18 aa, synthetic construct
KAEMGSGSPHSKAQNQQT

SEQ ID NO: 3279 - protein, 18 aa, synthetic construct
KATNGSGSPHSKAQNHQT

SEQ ID NO: 3280 - protein, 18 aa, synthetic construct
KAIKGSGSPHSKAQDQQT

SEQ ID NO: 3281 - protein, 18 aa, synthetic construct
KTINGSGSPHSKGHWQQT

SEQ ID NO: 3282 - protein, 18 aa, synthetic construct
KTDKTSGSPHSKAQNQQT

SEQ ID NO: 3283 - protein, 18 aa, synthetic construct
KTFKGSGSPHSKAPNQQT

SEQ ID NO: 3284 - protein, 18 aa, synthetic construct
KTVNGSGSPHSKAQNQLI

SEQ ID NO: 3285 - protein, 18 aa, synthetic construct
KTINGSGSPHSKRPEQQT

SEQ ID NO: 3286 - protein, 18 aa, synthetic construct
KTINGSGSPHSKAQRTMT

SEQ ID NO: 3287 - protein, 18 aa, synthetic construct
KTEKASGSPHSKAQNQQT

SEQ ID NO: 3288 - protein, 18 aa, synthetic construct
KSDQGSGSPHSKAQNQQT

SEQ ID NO: 3289 - protein, 18 aa, synthetic construct
KTEITSGSPHSKAQNQQT

SEQ ID NO: 3290 - protein, 18 aa, synthetic construct
KTDKSSGSPHSKAQNQQT

SEQ ID NO: 3291 - protein, 18 aa, synthetic construct
KTIDGSGSPHSKAQNQQH

SEQ ID NO: 3292 - protein, 18 aa, synthetic construct
KNTNGSGSPHSKAQNQQT

SEQ ID NO: 3293 - protein, 18 aa, synthetic construct
KTETHSGSPHSKAQNQQT

SEQ ID NO: 3294 - protein, 18 aa, synthetic construct
KTINGSGSPHSKALHQHT

SEQ ID NO: 3295 - protein, 18 aa, synthetic construct
KTINGSGSPHSKAQHRIT

SEQ ID NO: 3296 - protein, 18 aa, synthetic construct
KTINGSGSPHSKAQYIHT

SEQ ID NO: 3297 - protein, 18 aa, synthetic construct
KTENISGSPHSKAQNQQT

SEQ ID NO: 3298 - protein, 18 aa, synthetic construct
KTINGSGSPHSKAQKFET

SEQ ID NO: 3299 - protein, 18 aa, synthetic construct
KTSNESGSPHSKAQNHQT

SEQ ID NO: 3300 - protein, 18 aa, synthetic construct
KTINGSGSPHSKAQFPST

SEQ ID NO: 3301 - protein, 18 aa, synthetic construct
KTERPSGSPHSKAQNQQT

SEQ ID NO: 3302 - protein, 18 aa, synthetic construct
KTERMSGSPHSKAQNQQT

SEQ ID NO: 3303 - protein, 18 aa, synthetic construct
KTERSSGSPHSKAQNQQT

SEQ ID NO: 3304 - protein, 18 aa, synthetic construct
KTELHSGSPHSKAQNQQT

SEQ ID NO: 3305 - protein, 18 aa, synthetic construct
KTELTSGSPHSKAQNQQT

SEQ ID NO: 3306 - protein, 18 aa, synthetic construct
KTINGSGSPHSKAHNQQR

SEQ ID NO: 3307 - protein, 18 aa, synthetic construct
KTINGSGSPHSKAQAIKT

SEQ ID NO: 3308 - protein, 18 aa, synthetic construct
KTENTSGSPHSKAQNQQT

SEQ ID NO: 3309 - protein, 18 aa, synthetic construct
KTIDGSGSPHSKGQNRQT

SEQ ID NO: 3310 - protein, 18 aa, synthetic construct
KNINGSGSPHSKAQSQQT

SEQ ID NO: 3311 - protein, 18 aa, synthetic construct
KTSNASGSPHSKAQNQLT

SEQ ID NO: 3312 - protein, 18 aa, synthetic construct
KTEARSGSPHSKAQNQQT

SEQ ID NO: 3313 - protein, 18 aa, synthetic construct
KTEKNSGSPHSKAQNQQT

SEQ ID NO: 3314 - protein, 18 aa, synthetic construct
KTANGSGSPHSKAQYQQT

SEQ ID NO: 3315 - protein, 18 aa, synthetic construct
KTVNGSGSPHSKAQYQHT

SEQ ID NO: 3316 - protein, 18 aa, synthetic construct
KTINGSGSPHTKAQNPQS

SEQ ID NO: 3317 - protein, 18 aa, synthetic construct
KTINGSGSPHSKGQNPPT

SEQ ID NO: 3318 - protein, 18 aa, synthetic construct
KTIIGSGSPHSKAQHQLT

SEQ ID NO: 3319 - protein, 18 aa, synthetic construct
KTINGSGSPHSKAQSPPT

SEQ ID NO: 3320 - protein, 18 aa, synthetic construct
NTIYGSGSPHSKAQNQQT

SEQ ID NO: 3321 - protein, 18 aa, synthetic construct
KTINGSGSPHSKAQAKLT

SEQ ID NO: 3322 - protein, 18 aa, synthetic construct
KTDKNSGSPHSKAQNQQT

SEQ ID NO: 3323 - protein, 18 aa, synthetic construct
KTINGSGSPHSKTKSQQT

SEQ ID NO: 3324 - protein, 18 aa, synthetic construct
KTINGSGSPHSKAQDRPT

SEQ ID NO: 3325 - protein, 18 aa, synthetic construct
KTINGSGSPHSKAQSQQL

SEQ ID NO: 3326 - protein, 18 aa, synthetic construct
KTENLSGSPHSKAQNQQT

SEQ ID NO: 3327 - protein, 18 aa, synthetic construct
KTINGSGSPHSKAQAFHT

SEQ ID NO: 3328 - protein, 18 aa, synthetic construct
KTINGSGSPHSKAQKQQD

SEQ ID NO: 3329 - protein, 18 aa, synthetic construct
KTFSGSGSPHSKAQNLQT

SEQ ID NO: 3330 - protein, 18 aa, synthetic construct
KAINGSGSPHSKAQNAQT

SEQ ID NO: 3331 - protein, 18 aa, synthetic construct
KTESWSGSPHSKAQNQQT

SEQ ID NO: 3332 - protein, 18 aa, synthetic construct
KTTNGSGSPHSKAHNQLT

SEQ ID NO: 3333 - protein, 18 aa, synthetic construct
KTEDKSGSPHSKAQNQQT

SEQ ID NO: 3334 - protein, 18 aa, synthetic construct
KTESASGSPHSKAQNQQT

SEQ ID NO: 3335 - protein, 18 aa, synthetic construct
KTNNGSGSPHSKAQNQQY

SEQ ID NO: 3336 - protein, 18 aa, synthetic construct
KTDKMSGSPHSKAQNQQT

SEQ ID NO: 3337 - protein, 18 aa, synthetic construct
KEVHGSGSPHSKAQNQQT

SEQ ID NO: 3338 - protein, 18 aa, synthetic construct
KTINGSGSPHSKAQKLNT

SEQ ID NO: 3339 - protein, 18 aa, synthetic construct
KTTNGSGSPHSKAQYQHT

SEQ ID NO: 3340 - protein, 18 aa, synthetic construct
KTISGSGSPHSKAQYQHT

SEQ ID NO: 3341 - protein, 18 aa, synthetic construct
KTESTSGSPHSKAQNQQT

SEQ ID NO: 3342 - protein, 18 aa, synthetic construct
KTINGSGSPHSKSQNVQT

SEQ ID NO: 3343 - protein, 18 aa, synthetic construct
KSINGSGSPHSKAQAQQT

SEQ ID NO: 3344 - protein, 18 aa, synthetic construct
KTVNGSGSPHSKAQNLQA

SEQ ID NO: 3345 - protein, 18 aa, synthetic construct
KTVRDSGSPHSKAQNQQT

SEQ ID NO: 3346 - protein, 18 aa, synthetic construct
KTFNASGSPHSKAPNQQT

SEQ ID NO: 3347 - protein, 18 aa, synthetic construct
KTDRMSGSPHSKAQNQQT

SEQ ID NO: 3348 - protein, 18 aa, synthetic construct
KTINGSGSPHSKAQTPPT

SEQ ID NO: 3349 - protein, 18 aa, synthetic construct
ETIKGSGSPHSKAQNQQT

SEQ ID NO: 3350 - protein, 18 aa, synthetic construct
KNHIGSGSPHSKAQNQQT

SEQ ID NO: 3351 - protein, 18 aa, synthetic construct
KTINGSGSPHSKAQYQHA

SEQ ID NO: 3352 - protein, 18 aa, synthetic construct
KTINGSGSPHSKAQGQQA

SEQ ID NO: 3353 - protein, 18 aa, synthetic construct
KTFNGSGSPHNKAQNHQT

SEQ ID NO: 3354 - protein, 18 aa, synthetic construct
KESDGSGSPHSKAQNQQT

SEQ ID NO: 3355 - protein, 18 aa, synthetic construct
KTINGSGSPHSKAQPPAT

SEQ ID NO: 3356 - protein, 18 aa, synthetic construct
KTINGSGSPHSKAQERPT

SEQ ID NO: 3357 - protein, 18 aa, synthetic construct
KTIKGSGSPHSKAQDLQT

SEQ ID NO: 3358 - protein, 18 aa, synthetic construct
KTDLKSGSPHSKAQNQQT

SEQ ID NO: 3359 - protein, 18 aa, synthetic construct
KTINGSGSPHSKAQAMHT

SEQ ID NO: 3360 - protein, 18 aa, synthetic construct
KTVPNSGSPHSKAQNQQT

SEQ ID NO: 3361 - protein, 18 aa, synthetic construct
KTVIGSGSPHSKALNQQT

SEQ ID NO: 3362 - protein, 18 aa, synthetic construct
KTINGSGSPHSKAQHPST

SEQ ID NO: 3363 - protein, 18 aa, synthetic construct
KTINGSGSPHSKAPGLQT

SEQ ID NO: 3364 - protein, 18 aa, synthetic construct
KTINGSGSPHSKAQGIRT

SEQ ID NO: 3365 - protein, 18 aa, synthetic construct
KTESHSGSPHSKAQNQQT

SEQ ID NO: 3366 - protein, 18 aa, synthetic construct
KTINGSGSPHSKAQAPAT

SEQ ID NO: 3367 - protein, 18 aa, synthetic construct
KTINGSGSPHSKSQSQQI

SEQ ID NO: 3368 - protein, 18 aa, synthetic construct
KAEHGSGSPHSKAQNQQT

SEQ ID NO: 3369 - protein, 18 aa, synthetic construct
KTEDRSGSPHSKAQNQQT

SEQ ID NO: 3370 - protein, 18 aa, synthetic construct
KNCLGSGSPHSKAQNQQT

SEQ ID NO: 3371 - protein, 18 aa, synthetic construct
KTDRGSGSPHSKAQNQQT

SEQ ID NO: 3372 - protein, 18 aa, synthetic construct
KTINGSGSPHSKAQIPPT

SEQ ID NO: 3373 - protein, 18 aa, synthetic construct
KTVKGSGSPHSKAQDQQT

SEQ ID NO: 3374 - protein, 18 aa, synthetic construct
KNADGSGSPHSKAQNQQT

SEQ ID NO: 3375 - protein, 18 aa, synthetic construct
KTDKVSGSPHSKAQNQQT

SEQ ID NO: 3376 - protein, 18 aa, synthetic construct
KTITGSGSPHSKAQTQLT

SEQ ID NO: 3377 - protein, 18 aa, synthetic construct
KTINGSGSPHSKAQAPST

SEQ ID NO: 3378 - protein, 18 aa, synthetic construct
KNCVGSGSPHSKAQNQQT

SEQ ID NO: 3379 - protein, 18 aa, synthetic construct
KTVKDSGSPHSKAQNQQT

SEQ ID NO: 3380 - protein, 18 aa, synthetic construct
KNALGSGSPHSKAQNQQT

SEQ ID NO: 3381 - protein, 18 aa, synthetic construct
KVINGSGSPHSKGQNQQT

SEQ ID NO: 3382 - protein, 18 aa, synthetic construct
KTSNASGSPHSKAHNQQT

SEQ ID NO: 3383 - protein, 18 aa, synthetic construct
KTINGSGSPHSKAQNTYA

SEQ ID NO: 3384 - protein, 18 aa, synthetic construct
KTINGSGSPHSKSQNQHI

SEQ ID NO: 3385 - protein, 18 aa, synthetic construct
KTEFVSGSPHSKAQNQQT

SEQ ID NO: 3386 - protein, 18 aa, synthetic construct
KTVNGSGSPHSKAQNHLT

SEQ ID NO: 3387 - protein, 18 aa, synthetic construct
KTREISGSPHSKAQNQQT

SEQ ID NO: 3388 - protein, 18 aa, synthetic construct
KTINGSGSPHSKAQIGMT

SEQ ID NO: 3389 - protein, 18 aa, synthetic construct
KTIDGSGSPHSKALNKQT

SEQ ID NO: 3390 - protein, 18 aa, synthetic construct
KQGEGSGSPHSKAQNQQT

SEQ ID NO: 3391 - protein, 18 aa, synthetic construct
KTVNGSGSPHSKAQLQQT

SEQ ID NO: 3392 - protein, 18 aa, synthetic construct
KSINGSGSPHSKTQSQQT

SEQ ID NO: 3393 - protein, 18 aa, synthetic construct
KSEKGSGSPHSKAQNQQT

SEQ ID NO: 3394 - protein, 18 aa, synthetic construct
KNVNGSGSPHSKAQNQQT

SEQ ID NO: 3395 - protein, 18 aa, synthetic construct
KGGEGSGSPHSKAQNQQT

SEQ ID NO: 3396 - protein, 18 aa, synthetic construct
KTINGSGSPHSKAQRMST

SEQ ID NO: 3397 - protein, 18 aa, synthetic construct
KTINGSGSPHSKAQGILT

SEQ ID NO: 3398 - protein, 18 aa, synthetic construct
KEFVGSGSPHSKAQNQQT

SEQ ID NO: 3399 - protein, 18 aa, synthetic construct
KTIIGSGSPHSKAQDRQT

SEQ ID NO: 3400 - protein, 18 aa, synthetic construct
KSDKGSGSPHSKAQNQQT

SEQ ID NO: 3401 - protein, 18 aa, synthetic construct
KTEQVSGSPHSKAQNQQT

SEQ ID NO: 3402 - protein, 18 aa, synthetic construct
KTEHVSGSPHSKAQNQQT

SEQ ID NO: 3403 - protein, 18 aa, synthetic construct
KTINGSGSPHSKARDWQT

SEQ ID NO: 3404 - protein, 18 aa, synthetic construct
KTENASGSPHSKAQNQQT

SEQ ID NO: 3405 - protein, 18 aa, synthetic construct
KEVQGSGSPHSKAQNQQT

SEQ ID NO: 3406 - protein, 18 aa, synthetic construct
KTINGSGSPHSKAQNTHD

SEQ ID NO: 3407 - protein, 18 aa, synthetic construct
KTINGSGSPHSKAPNLQI

SEQ ID NO: 3408 - protein, 18 aa, synthetic construct
KTINGSGSPHSKAQERST

SEQ ID NO: 3409 - protein, 18 aa, synthetic construct
KTSNGSGSPHSKAQNYQT

SEQ ID NO: 3410 - protein, 18 aa, synthetic construct
KTEYISGSPHSKAQNQQT

SEQ ID NO: 3411 - protein, 18 aa, synthetic construct
KTINGSGSPHSKAQRTCT

SEQ ID NO: 3412 - protein, 18 aa, synthetic construct
KTINGSGSPHSKAQIGHT

SEQ ID NO: 3413 - protein, 18 aa, synthetic construct
KNCWGSGSPHSKAQNQQT

SEQ ID NO: 3414 - protein, 18 aa, synthetic construct
KTINGSGSPHSKAQGAIT

SEQ ID NO: 3415 - protein, 18 aa, synthetic construct
KTDVNSGSPHSKAQNQQT

SEQ ID NO: 3416 - protein, 18 aa, synthetic construct
KSDIGSGSPHSKAQNQQT

SEQ ID NO: 3417 - protein, 18 aa, synthetic construct
KTINGSGSPHSKAQVPPT

SEQ ID NO: 3418 - protein, 18 aa, synthetic construct
KTINGSGSPHSKAQVQQI

SEQ ID NO: 3419 - protein, 18 aa, synthetic construct
KTINGSGSPHSKALMRQT

SEQ ID NO: 3420 - protein, 18 aa, synthetic construct
KTINGSGSPHSKAQYSVT

SEQ ID NO: 3421 - protein, 18 aa, synthetic construct
KNSIGSGSPHSKAQNQQT

SEQ ID NO: 3422 - protein, 18 aa, synthetic construct
KTINGSGSPHSKVPNLQT

SEQ ID NO: 3423 - protein, 18 aa, synthetic construct
KAINGSGSPHSKAQSQQI

SEQ ID NO: 3424 - protein, 18 aa, synthetic construct
KTINGSGSPHSKAQAITT

SEQ ID NO: 3425 - protein, 18 aa, synthetic construct
KTINGSGSPHSKAQKTLT

SEQ ID NO: 3426 - protein, 18 aa, synthetic construct
KTVNGSGSPHSKAQNQWT

SEQ ID NO: 3427 - protein, 18 aa, synthetic construct
KTINGSGSPHSKAQLHHT

SEQ ID NO: 3428 - protein, 18 aa, synthetic construct
KTEQTSGSPHSKAQNQQT

SEQ ID NO: 3429 - protein, 18 aa, synthetic construct
KTINGSGSPHSKAQNIII

SEQ ID NO: 3430 - protein, 18 aa, synthetic construct
KNSLGSGSPHSKAQNQQT

SEQ ID NO: 3431 - protein, 18 aa, synthetic construct
KTINGSGSPHSKAQGHHT

SEQ ID NO: 3432 - protein, 18 aa, synthetic construct
KTDRTSGSPHSKAQNQQT

SEQ ID NO: 3433 - protein, 18 aa, synthetic construct
KTINGSGSPHSKAQSKVT

SEQ ID NO: 3434 - protein, 18 aa, synthetic construct
KEVVGSGSPHSKAQNQQT

SEQ ID NO: 3435 - protein, 18 aa, synthetic construct
KTINGSGSPHSKAQLPST

SEQ ID NO: 3436 - protein, 18 aa, synthetic construct
KTINGSGSPHSKAIGKQT

SEQ ID NO: 3437 - protein, 18 aa, synthetic construct
KTEPTSGSPHSKAQNQQT

SEQ ID NO: 3438 - protein, 18 aa, synthetic construct
KTINGSGSPHSKAQAIHT

SEQ ID NO: 3439 - protein, 18 aa, synthetic construct
KTINGSGSPHSKAQHGLT

SEQ ID NO: 3440 - protein, 18 aa, synthetic construct
KSELGSGSPHSKAQNQQT

SEQ ID NO: 3441 - protein, 18 aa, synthetic construct
KTINGSGSPHSKAQFMCT

SEQ ID NO: 3442 - protein, 18 aa, synthetic construct
KTINVSGSPHSKAQGQQT

SEQ ID NO: 3443 - protein, 18 aa, synthetic construct
KTVNGSGSPHSKAQHLQT

SEQ ID NO: 3444 - protein, 18 aa, synthetic construct
KTINGSGSPHSKTQNHQN

SEQ ID NO: 3445 - protein, 18 aa, synthetic construct
KTINGSGSPHSKAQPART

SEQ ID NO: 3446 - protein, 18 aa, synthetic construct
KTVNGSGSPHSKAQSLQT

SEQ ID NO: 3447 - protein, 18 aa, synthetic construct
KTINGSGSPHSKSQSQLT

SEQ ID NO: 3448 - protein, 18 aa, synthetic construct
KTWQNSGSPHSKAQNQQT

SEQ ID NO: 3449 - protein, 18 aa, synthetic construct
KTINGSGSPHSKAQDRQS

SEQ ID NO: 3450 - protein, 18 aa, synthetic construct
KTINGSGSPHSKAQMPST

SEQ ID NO: 3451 - protein, 18 aa, synthetic construct
KTINGSGSPHSKAQGSLT

SEQ ID NO: 3452 - protein, 18 aa, synthetic construct
KTEVTSGSPHSKAQNQQT

SEQ ID NO: 3453 - protein, 18 aa, synthetic construct
KTVIGSGSPHSKSQNQQT

SEQ ID NO: 3454 - protein, 18 aa, synthetic construct
KAVNVSGSPHSKAQNQQT

SEQ ID NO: 3455 - protein, 18 aa, synthetic construct
KTDRNSGSPHSKAQNQQT

SEQ ID NO: 3456 - protein, 18 aa, synthetic construct
KTINGSGSPHSKAQVPAT

SEQ ID NO: 3457 - protein, 18 aa, synthetic construct
KGVLGSGSPHSKAQNQQT

SEQ ID NO: 3458 - protein, 18 aa, synthetic construct
KAINGSGSPHSKAQDKQT

SEQ ID NO: 3459 - protein, 18 aa, synthetic construct
KTSNGSGSPHSKAHYQQT

SEQ ID NO: 3460 - protein, 18 aa, synthetic construct
KTINGSGSPHSKAQVPST

SEQ ID NO: 3461 - protein, 18 aa, synthetic construct
KTELRSGSPHSKAQNQQT

SEQ ID NO: 3462 - protein, 18 aa, synthetic construct
KNINGSGSPHSKAQNHQT

SEQ ID NO: 3463 - protein, 18 aa, synthetic construct
KTINGSGSPHSKARGEQT

SEQ ID NO: 3464 - protein, 18 aa, synthetic construct
KTEDLSGSPHSKAQNQQT

SEQ ID NO: 3465 - protein, 18 aa, synthetic construct
KTINGSGSPHSKAPGQQT

SEQ ID NO: 3466 - protein, 18 aa, synthetic construct
KTINGSGSPHSKAQSLQI

SEQ ID NO: 3467 - protein, 18 aa, synthetic construct
KTINGSGSPHSKRLEQQT

SEQ ID NO: 3468 - protein, 18 aa, synthetic construct
KTERGSGSPHSKAQNQQT

SEQ ID NO: 3469 - protein, 18 aa, synthetic construct
KTVNGSGSPHSKAPNQQT

SEQ ID NO: 3470 - protein, 18 aa, synthetic construct
KTSNGSGSPHSKAQNQST

SEQ ID NO: 3471 - protein, 18 aa, synthetic construct
KTINGSGSPHSKAQKVIT

SEQ ID NO: 3472 - protein, 18 aa, synthetic construct
KTEGISGSPHSKAQNQQT

SEQ ID NO: 3473 - protein, 18 aa, synthetic construct
KTINGSGSPHSKAQNNDQ

SEQ ID NO: 3474 - protein, 18 aa, synthetic construct
KTINGSGSPHSKAQSVHT

SEQ ID NO: 3475 - protein, 18 aa, synthetic construct
KTINGSGSPHSKAQPLGT

SEQ ID NO: 3476 - protein, 18 aa, synthetic construct
KTCNASGSPHSKAQNQQT

SEQ ID NO: 3477 - protein, 18 aa, synthetic construct
KAINGSGSPHSKAHNQET

SEQ ID NO: 3478 - protein, 18 aa, synthetic construct
KTEGLSGSPHSKAQNQQT

SEQ ID NO: 3479 - protein, 18 aa, synthetic construct
KTRDASGSPHSKAQNQQT

SEQ ID NO: 3480 - protein, 18 aa, synthetic construct
KTSNGSGSPHSKAQNLQI

SEQ ID NO: 3481 - protein, 18 aa, synthetic construct
KTGNGSGSPHSKAQIQQT

SEQ ID NO: 3482 - protein, 18 aa, synthetic construct
KTDRSSGSPHSKAQNQQT

SEQ ID NO: 3483 - protein, 18 aa, synthetic construct
KTINGSGSPHSKAQVRNT

SEQ ID NO: 3484 - protein, 18 aa, synthetic construct
KTINGSGSPHSKAPSNQT

SEQ ID NO: 3485 - protein, 18 aa, synthetic construct
KTINGSGSPHSKAQVGHT

SEQ ID NO: 3486 - protein, 18 aa, synthetic construct
KNAIGSGSPHSKAQNQQT

SEQ ID NO: 3487 - protein, 18 aa, synthetic construct
KAENGSGSPHSKAQNQQT

SEQ ID NO: 3488 - protein, 18 aa, synthetic construct
KTINGSGSPHSKAQRDIT

SEQ ID NO: 3489 - protein, 18 aa, synthetic construct
KTINGSGSPHSKAQMPNT

SEQ ID NO: 3490 - protein, 18 aa, synthetic construct
KTVNGSGSPHSKSQNQQT

SEQ ID NO: 3491 - protein, 18 aa, synthetic construct
KTINGSGSPHSKARGLQT

SEQ ID NO: 3492 - protein, 18 aa, synthetic construct
KTELGSGSPHSKAQNQQT

SEQ ID NO: 3493 - protein, 18 aa, synthetic construct
KAETGSGSPHSKAQNQQT

SEQ ID NO: 3494 - protein, 18 aa, synthetic construct
KTINGSGSPHSKLQKQQT

SEQ ID NO: 3495 - protein, 18 aa, synthetic construct
KTINGSGSPHSKAPSLQT

SEQ ID NO: 3496 - protein, 18 aa, synthetic construct
KTINGSGSPHSKAQRDQT

SEQ ID NO: 3497 - protein, 18 aa, synthetic construct
KTDVGSGSPHSKAQNQQT

SEQ ID NO: 3498 - protein, 18 aa, synthetic construct
KTINGSGSPHSKNRDQQT

SEQ ID NO: 3499 - protein, 18 aa, synthetic construct
KSINGSGSPHSKAPNLQT

SEQ ID NO: 3500 - protein, 18 aa, synthetic construct
KTINGSGSPHSKAQAKGT

SEQ ID NO: 3501 - protein, 18 aa, synthetic construct
KTVNGSGSPHSKAQDKQT

SEQ ID NO: 3502 - protein, 18 aa, synthetic construct
KTINGSGSPHSKAQSAHT

SEQ ID NO: 3503 - protein, 18 aa, synthetic construct
KTVPTSGSPHSKAQNQQT

SEQ ID NO: 3504 - protein, 18 aa, synthetic construct
KTIDGSGSPHSKSQNHQT

SEQ ID NO: 3505 - protein, 18 aa, synthetic construct
KTDVKSGSPHSKAQNQQT

SEQ ID NO: 3506 - protein, 18 aa, synthetic construct
KAINRSGSPHSKAQDQQT

SEQ ID NO: 3507 - protein, 18 aa, synthetic construct
KTINGSGSPHSKAQSTMT

SEQ ID NO: 3508 - protein, 18 aa, synthetic construct
KTVNASGSPHSKAQNQLT

SEQ ID NO: 3509 - protein, 18 aa, synthetic construct
KTINGSGSPHSKAQREMT

SEQ ID NO: 3510 - protein, 18 aa, synthetic construct
KTVHGSGSPHSKAQSQQT

SEQ ID NO: 3511 - protein, 18 aa, synthetic construct
KTINGSGSPHSKAQYRAT

SEQ ID NO: 3512 - protein, 18 aa, synthetic construct
KTEPMSGSPHSKAQNQQT

SEQ ID NO: 3513 - protein, 18 aa, synthetic construct
KTINGSGSPHSKNQWQQT

SEQ ID NO: 3514 - protein, 18 aa, synthetic construct
KETAGSGSPHSKAQNQQT

SEQ ID NO: 3515 - protein, 18 aa, synthetic construct
KTINGSGSPHSKAQRMNT

SEQ ID NO: 3516 - protein, 18 aa, synthetic construct
KNNLGSGSPHSKAQNQQT

SEQ ID NO: 3517 - protein, 18 aa, synthetic construct
KTINGSGSPHAKAQNHQT

SEQ ID NO: 3518 - protein, 18 aa, synthetic construct
KTINGSGSPHSKAGDSQT

SEQ ID NO: 3519 - protein, 18 aa, synthetic construct
KTINGSGSPHSKLKSQQT

SEQ ID NO: 3520 - protein, 18 aa, synthetic construct
KTINGSGSPHSKAQKIST

SEQ ID NO: 3521 - protein, 18 aa, synthetic construct
KTEYNSGSPHSKAQNQQT

SEQ ID NO: 3522 - protein, 18 aa, synthetic construct
KTINGSGSPHSKAPSMQT

SEQ ID NO: 3523 - protein, 18 aa, synthetic construct
EAINGSGSPHSKAQNQQT

SEQ ID NO: 3524 - protein, 18 aa, synthetic construct
KTINGSGSPHSKASPRQT

SEQ ID NO: 3525 - protein, 18 aa, synthetic construct
KTINGSGSPHSKRMEQQT

SEQ ID NO: 3526 - protein, 18 aa, synthetic construct
KTINGSGSPHSKAQYQNT

SEQ ID NO: 3527 - protein, 18 aa, synthetic construct
KEINGRGSPHSKAQNQQT

SEQ ID NO: 3528 - protein, 18 aa, synthetic construct
KTVNRNGSPHSKAQNQQT

SEQ ID NO: 3529 - protein, 18 aa, synthetic construct
KTINGPGSPHSKAHNQQT

SEQ ID NO: 3530 - protein, 18 aa, synthetic construct
KTSYGNGSPHSKAQNQQT

SEQ ID NO: 3531 - protein, 18 aa, synthetic construct
KSVNGNGSPHSKAQNQQT

SEQ ID NO: 3532 - protein, 18 aa, synthetic construct
KTINGSGSPHGWVQNQQT

SEQ ID NO: 3533 - protein, 18 aa, synthetic construct
KTINGGGSPHSKAQTQQI

SEQ ID NO: 3534 - protein, 18 aa, synthetic construct
KTVHGNGSPHSKAQNQQT

SEQ ID NO: 3535 - protein, 18 aa, synthetic construct
KTINGGGSPHSKAQNQQC

SEQ ID NO: 3536 - protein, 18 aa, synthetic construct
KTIDGGGSPHSKAQNKQT

SEQ ID NO: 3537 - protein, 18 aa, synthetic construct
KTINGGGSPHSKAQNQLI

SEQ ID NO: 3538 - protein, 18 aa, synthetic construct
KNINGGGSPHSKAQNQQT

SEQ ID NO: 3539 - protein, 18 aa, synthetic construct
KTINGGGSPHSKSQNQLT

SEQ ID NO: 3540 - protein, 18 aa, synthetic construct
KTVNGNGSPHSKAQNKQT

SEQ ID NO: 3541 - protein, 18 aa, synthetic construct
KTVNGNGSPHSKAQNQHT

SEQ ID NO: 3542 - protein, 18 aa, synthetic construct
KTINGGGSPHSKALNQQN

SEQ ID NO: 3543 - protein, 18 aa, synthetic construct
KTINGTGSPHSKAQNHQI

SEQ ID NO: 3544 - protein, 18 aa, synthetic construct
KTIIGGGSPHSKAHNQQT

SEQ ID NO: 3545 - protein, 18 aa, synthetic construct
KTINGNGSPHSKAQNPLT

SEQ ID NO: 3546 - protein, 18 aa, synthetic construct
KSIKGNGSPHSKAQNQQT

SEQ ID NO: 3547 - protein, 18 aa, synthetic construct
KTINGGGSPHSKAQSQQI

SEQ ID NO: 3548 - protein, 18 aa, synthetic construct
KTINGSVSPHGKAQNQLT

SEQ ID NO: 3549 - protein, 18 aa, synthetic construct
KTINGIGSPHSKAQNLGT

SEQ ID NO: 3550 - protein, 18 aa, synthetic construct
KTVNGNGSPHSKAQNHQT

SEQ ID NO: 3551 - protein, 18 aa, synthetic construct
KTSNGGGSPHSKAQNLQT

SEQ ID NO: 3552 - protein, 18 aa, synthetic construct
KTINGGGSPHSKSQNQHT

SEQ ID NO: 3553 - protein, 18 aa, synthetic construct
KTVNGGGSPHSKAQSQQT

SEQ ID NO: 3554 - protein, 18 aa, synthetic construct
KTIPIDGSPHSKAQNQQT

SEQ ID NO: 3555 - protein, 18 aa, synthetic construct
KTINGGGSPHSKAQNPPT

SEQ ID NO: 3556 - protein, 18 aa, synthetic construct
KTINGLGSPHSKSQNQQT

SEQ ID NO: 3557 - protein, 18 aa, synthetic construct
KTINGTGSPHSKAQNQQM

SEQ ID NO: 3558 - protein, 18 aa, synthetic construct
KTIRDAGSPHSKAQNQQT

SEQ ID NO: 3559 - protein, 18 aa, synthetic construct
KTVNGGGSPHSKAQNQQS

SEQ ID NO: 3560 - protein, 18 aa, synthetic construct
KTIQDGGSPHSKAQNQQT

SEQ ID NO: 3561 - protein, 18 aa, synthetic construct
KTISGGGSPHSKAQNQQN

SEQ ID NO: 3562 - protein, 18 aa, synthetic construct
KTINGGGSPHSKAQDKQT

SEQ ID NO: 3563 - protein, 18 aa, synthetic construct
KTIIGGGSPHSKAQNPQT

SEQ ID NO: 3564 - protein, 18 aa, synthetic construct
KTINGTGSPHSKAPNQLT

SEQ ID NO: 3565 - protein, 18 aa, synthetic construct
KTFNGGGSPHSKAQYQQT

SEQ ID NO: 3566 - protein, 18 aa, synthetic construct
KTVNGGGSPHSKAQHQQT

SEQ ID NO: 3567 - protein, 18 aa, synthetic construct
KTIPMEGSPHSKAQNQQT

SEQ ID NO: 3568 - protein, 18 aa, synthetic construct
KTVNGGGSPHSKSQNQQT

SEQ ID NO: 3569 - protein, 18 aa, synthetic construct
KTINGGGSPHSKAQNQMT

SEQ ID NO: 3570 - protein, 18 aa, synthetic construct
KTIRENGSPHSKAQNQQT

SEQ ID NO: 3571 - protein, 18 aa, synthetic construct
KTINGSASPHSKAHSQQT

SEQ ID NO: 3572 - protein, 18 aa, synthetic construct
KTNNGGGSPHSKAQNLQT

SEQ ID NO: 3573 - protein, 18 aa, synthetic construct
KSINGGGSPHSKAQYQQT

SEQ ID NO: 3574 - protein, 18 aa, synthetic construct
KTVNGNGSPHSKSQNQQT

SEQ ID NO: 3575 - protein, 18 aa, synthetic construct
KTLNGNGSPHSKAQNLQT

SEQ ID NO: 3576 - protein, 18 aa, synthetic construct
KTINGSGSSHSKAQNQQT

SEQ ID NO: 3577 - protein, 18 aa, synthetic construct
KTVNGGGSPHSKAQNHQT

SEQ ID NO: 3578 - protein, 18 aa, synthetic construct
KTINGGGSPHSKAQYQHT

SEQ ID NO: 3579 - protein, 18 aa, synthetic construct
KTIPKNGSPHSKAQNQQT

SEQ ID NO: 3580 - protein, 18 aa, synthetic construct
KTINKEGSPHSKAQNQQT

SEQ ID NO: 3581 - protein, 18 aa, synthetic construct
KTVNGGGSPHSKAQNLQT

SEQ ID NO: 3582 - protein, 18 aa, synthetic construct
KTIPAIGSPHSKAQNQQT

SEQ ID NO: 3583 - protein, 18 aa, synthetic construct
KTINGGGSPHSKAQNPQA

SEQ ID NO: 3584 - protein, 18 aa, synthetic construct
KTINGNGSPHSKSQNQHT

SEQ ID NO: 3585 - protein, 18 aa, synthetic construct
KTINGGGSPHSKSQNRQT

SEQ ID NO: 3586 - protein, 18 aa, synthetic construct
KTINGGGSPHSKAQRQQT

SEQ ID NO: 3587 - protein, 18 aa, synthetic construct
KTIIKNGSPHSKAQNQQT

SEQ ID NO: 3588 - protein, 18 aa, synthetic construct
KTINGSGSPHSYHVNQQT

SEQ ID NO: 3589 - protein, 18 aa, synthetic construct
KTERVSGSPHSKAQNQQT

SEQ ID NO: 3590 - skipped

SEQ ID NO: 3591 - protein, 18 aa, synthetic construct
KTFNRSGSPHSKAQNQQI

SEQ ID NO: 3592 - protein, 18 aa, synthetic construct
KTINGSGSPHTKAQNPPT

SEQ ID NO: 3593 - protein, 18 aa, synthetic construct
KSLNGSGSPHTKAQNQQT

SEQ ID NO: 3594 - protein, 18 aa, synthetic construct
KTENKSGSPHSKAQNQQT

SEQ ID NO: 3595 - protein, 18 aa, synthetic construct
KTDKGSGSPHSKAQNQQT

SEQ ID NO: 3596 - protein, 18 aa, synthetic construct
KTSNASGSPHSKAQHQQT

SEQ ID NO: 3597 - protein, 18 aa, synthetic construct
KTINASGSPHSKAINQQT

SEQ ID NO: 3598 - protein, 18 aa, synthetic construct
KTINGSGSPHSKAPNQQH

SEQ ID NO: 3599 - protein, 18 aa, synthetic construct
KTVNASGSPHSKAQNHQT

SEQ ID NO: 3600 - protein, 18 aa, synthetic construct
KTIDGSGSPHSKAENRQT

SEQ ID NO: 3601 - protein, 18 aa, synthetic construct
KTIKGSGSPHSKVQDQQT

SEQ ID NO: 3602 - protein, 18 aa, synthetic construct
KAINGSGSPHSKAQTQQA

SEQ ID NO: 3603 - protein, 18 aa, synthetic construct
KTEAKSGSPHSKAQNQQT

SEQ ID NO: 3604 - protein, 18 aa, synthetic construct
KTIPGSGSPHSKAQNLQT

SEQ ID NO: 3605 - protein, 18 aa, synthetic construct
KTIHGSGSPHSKAQNQAT

SEQ ID NO: 3606 - protein, 18 aa, synthetic construct
KAINGHDSPHKSGQIRQT

SEQ ID NO: 3607 - protein, 18 aa, synthetic construct
KTINGHDSPHKIGQNQHA

SEQ ID NO: 3608 - protein, 18 aa, synthetic construct
KAINGYDSPHKSGQKQQT

SEQ ID NO: 3609 - protein, 18 aa, synthetic construct
KTESGHDSPHKSGQNQQT

SEQ ID NO: 3610 - protein, 18 aa, synthetic construct
KTINGHDSPHKSGQSVQT

SEQ ID NO: 3611 - protein, 18 aa, synthetic construct
TTINGHDSPHKSGQNQQT

SEQ ID NO: 3612 - protein, 18 aa, synthetic construct
KTINGHESPHKSGRSQQT

SEQ ID NO: 3613 - protein, 18 aa, synthetic construct
KTINGHDSPHKSGQNKLE

SEQ ID NO: 3614 - protein, 18 aa, synthetic construct
KTINGHDSPHKTGQNQQK

SEQ ID NO: 3615 - protein, 18 aa, synthetic construct
KAINGHDNPHKSGQNQQT

SEQ ID NO: 3616 - protein, 18 aa, synthetic construct
KTINGQDSPHKSGQHQQA

SEQ ID NO: 3617 - protein, 18 aa, synthetic construct
KSINGHDSPHKSGQIQHT

SEQ ID NO: 3618 - protein, 18 aa, synthetic construct
KAINGHDSPHKSGPRQQT

SEQ ID NO: 3619 - protein, 18 aa, synthetic construct
KTVNGHDSPHKSGHTQQT

SEQ ID NO: 3620 - protein, 18 aa, synthetic construct
KSINGHDSPHKSGQRQHT

SEQ ID NO: 3621 - protein, 18 aa, synthetic construct
KAINGHDSPHKSAQSQQT

SEQ ID NO: 3622 - protein, 18 aa, synthetic construct
KSIYGHESPHKSGQNQQS

SEQ ID NO: 3623 - protein, 18 aa, synthetic construct
KTVNGHDSPHKSLQNQQT

SEQ ID NO: 3624 - protein, 18 aa, synthetic construct
KTSNGYDSPHKSGQKQQT

SEQ ID NO: 3625 - protein, 18 aa, synthetic construct
KTVNGHDSPHKSGRNQET

SEQ ID NO: 3626 - protein, 18 aa, synthetic construct
KTTNGHDSPHKSGQTQLT

SEQ ID NO: 3627 - protein, 18 aa, synthetic construct
KAINGHDSPHKSEKNQQT

SEQ ID NO: 3628 - protein, 18 aa, synthetic construct
KIINGRDSPHKSGQDQQT

SEQ ID NO: 3629 - protein, 18 aa, synthetic construct
KTISGHDSPHKTGHNQQT

SEQ ID NO: 3630 - protein, 18 aa, synthetic construct
KTVNAHDSPHKSGQNQLT

SEQ ID NO: 3631 - protein, 18 aa, synthetic construct
KSINGYDSPHKSGQTQQT

SEQ ID NO: 3632 - protein, 18 aa, synthetic construct
KTINGHESPHKSGQTQQI

SEQ ID NO: 3633 - protein, 18 aa, synthetic construct
KTINGHDSPHKSGQSKQA

SEQ ID NO: 3634 - protein, 18 aa, synthetic construct
KAIIGHESPHKSGQNQQT

SEQ ID NO: 3635 - protein, 18 aa, synthetic construct
KTINGHDSPHKTGQNQPP

SEQ ID NO: 3636 - protein, 18 aa, synthetic construct
KAINGHDSPHKSGQSPQT

SEQ ID NO: 3637 - protein, 18 aa, synthetic construct
KTIKGNDSPHKSVQNQQT

SEQ ID NO: 3638 - protein, 18 aa, synthetic construct
KTEFGHDSPHKSGQNQQT

SEQ ID NO: 3639 - protein, 18 aa, synthetic construct
KTINGHDSPHKSAQNYQT

SEQ ID NO: 3640 - protein, 18 aa, synthetic construct
KTINAHDSPHKIGQNHQT

SEQ ID NO: 3641 - protein, 18 aa, synthetic construct
KTINGHESPHKSAQNRQT

SEQ ID NO: 3642 - protein, 18 aa, synthetic construct
KTTNGHDSPHKSGQNQQG

SEQ ID NO: 3643 - protein, 18 aa, synthetic construct
KTIKGQDSPHKIGQNQQT

SEQ ID NO: 3644 - protein, 18 aa, synthetic construct
KTVNGHDSPHKSGQNHLT

SEQ ID NO: 3645 - protein, 18 aa, synthetic construct
KSINGHDSPHKSGQYQHT

SEQ ID NO: 3646 - protein, 18 aa, synthetic construct
KTINGNDSPHKSVQNHQT

SEQ ID NO: 3647 - protein, 18 aa, synthetic construct
KTITGHDSPHKSGQNQWT

SEQ ID NO: 3648 - protein, 18 aa, synthetic construct
KTNNGHDSPHKSVQNQHT

SEQ ID NO: 3649 - protein, 18 aa, synthetic construct
KTIDGHDSPHKSGQNQHA

SEQ ID NO: 3650 - protein, 18 aa, synthetic construct
KTVNGHDSPHKSGQTRQT

SEQ ID NO: 3651 - protein, 18 aa, synthetic construct
KTVNGHDSPHKSGQNLHT

SEQ ID NO: 3652 - protein, 18 aa, synthetic construct
KAISGHDSPHKSGLNQQT

SEQ ID NO: 3653 - protein, 18 aa, synthetic construct
KAINGHDSPHKSAQNQET

SEQ ID NO: 3654 - protein, 18 aa, synthetic construct
KTITGHDSPHKSGQHLQT

SEQ ID NO: 3655 - protein, 18 aa, synthetic construct
KTINGHDSPHKSRLNQPT

SEQ ID NO: 3656 - protein, 18 aa, synthetic construct
KTVDGHDSPHKSGQKQQT

SEQ ID NO: 3657 - protein, 18 aa, synthetic construct
KTINGQDSPHKSGQNQDT

SEQ ID NO: 3658 - protein, 18 aa, synthetic construct
KTIEGHDSPHKSGRNQQT

SEQ ID NO: 3659 - protein, 18 aa, synthetic construct
KTTNGHDSPHKSGQNLLT

SEQ ID NO: 3660 - protein, 18 aa, synthetic construct
KTINGHDSPHKSGQLVIT

SEQ ID NO: 3661 - protein, 18 aa, synthetic construct
KTVNGHDSPHKSRQSQQT

SEQ ID NO: 3662 - protein, 18 aa, synthetic construct
KTINGHDSPHKSGRTQET

SEQ ID NO: 3663 - protein, 18 aa, synthetic construct
KTINGHDSPHKSVQTHQT

SEQ ID NO: 3664 - protein, 18 aa, synthetic construct
KTSNGHDSPHKSGQNQPA

SEQ ID NO: 3665 - protein, 18 aa, synthetic construct
KTEGKHDSPHKSGQNQQT

SEQ ID NO: 3666 - protein, 18 aa, synthetic construct
KVINGHDSPHKSGQTQQT

SEQ ID NO: 3667 - protein, 18 aa, synthetic construct
KTINGPDSPHKIGQNQQS

SEQ ID NO: 3668 - protein, 18 aa, synthetic construct
KAVNGHDSPHKSVQNQQT

SEQ ID NO: 3669 - protein, 18 aa, synthetic construct
KTINGHDSPHKSRQDQHT

SEQ ID NO: 3670 - protein, 18 aa, synthetic construct
KAINGPDSPHKSGQKQQT

SEQ ID NO: 3671 - protein, 18 aa, synthetic construct
KTINGHDSPHKSRQSQHT

SEQ ID NO: 3672 - protein, 18 aa, synthetic construct
KTIYGHDSPHKSVQNQLT

SEQ ID NO: 3673 - protein, 18 aa, synthetic construct
KTVNGHDSPHKSGQNLLT

SEQ ID NO: 3674 - protein, 18 aa, synthetic construct
KTESAHDSPHKSGQNQQT

SEQ ID NO: 3675 - protein, 18 aa, synthetic construct
KTTNGQDSPHKSGQNQQS

SEQ ID NO: 3676 - protein, 18 aa, synthetic construct
KTIDGHDSPHKSGRNQQI

SEQ ID NO: 3677 - protein, 18 aa, synthetic construct
KTINGYDSPHKSGQYQHT

SEQ ID NO: 3678 - protein, 18 aa, synthetic construct
KTDNGHDSPHKSRQNQQT

SEQ ID NO: 3679 - protein, 18 aa, synthetic construct
KTINGHDSPHKSWVRQQT

SEQ ID NO: 3680 - protein, 18 aa, synthetic construct
KTINGHESPHKSGQNQHS

SEQ ID NO: 3681 - protein, 18 aa, synthetic construct
KTVNGHDSPHKIGHNQQT

SEQ ID NO: 3682 - protein, 18 aa, synthetic construct
KTCNGHDSPHKSGRNQQT

SEQ ID NO: 3683 - protein, 18 aa, synthetic construct
KNVVGHDSPHKSGQNQQT

SEQ ID NO: 3684 - protein, 18 aa, synthetic construct
KTELWHDSPHKSGQNQQT

SEQ ID NO: 3685 - protein, 18 aa, synthetic construct
KTELRHDSPHKSGQNQQT

SEQ ID NO: 3686 - protein, 18 aa, synthetic construct
KTINGHDSPHKSNAWQQT

SEQ ID NO: 3687 - protein, 18 aa, synthetic construct
KTDAGHDSPHKSGQNQQT

SEQ ID NO: 3688 - protein, 18 aa, synthetic construct
KTEVGHDSPHKSGQNQQT

SEQ ID NO: 3689 - protein, 18 aa, synthetic construct
KTESRHDSPHKSGQNQQT

SEQ ID NO: 3690 - protein, 18 aa, synthetic construct
KSELGHDSPHKSGQNQQT

SEQ ID NO: 3691 - protein, 18 aa, synthetic construct
KTINGHDSPHKSGQSVPT

SEQ ID NO: 3692 - protein, 18 aa, synthetic construct
KTINGHESPHKSGQNIQP

SEQ ID NO: 3693 - protein, 18 aa, synthetic construct
KTEMKHDSPHKSGQNQQT

SEQ ID NO: 3694 - protein, 18 aa, synthetic construct
KTINGHDSPHKSVQNHLN

SEQ ID NO: 3695 - protein, 18 aa, synthetic construct
KTINGHDSPHKIGLDQQT

SEQ ID NO: 3696 - protein, 18 aa, synthetic construct
KTINGHDSPHKRGPDQQS

SEQ ID NO: 3697 - protein, 18 aa, synthetic construct
KTIKGHDSPHKSGESQQT

SEQ ID NO: 3698 - protein, 18 aa, synthetic construct
KTEGWHDSPHKSGQNQQT

SEQ ID NO: 3699 - protein, 18 aa, synthetic construct
KTINGHDSPHKHGQNHQT

SEQ ID NO: 3700 - protein, 18 aa, synthetic construct
KTEQLHDSPHKSGQNQQT

SEQ ID NO: 3701 - protein, 18 aa, synthetic construct
KTIIGHDSPHKSGQYQHT

SEQ ID NO: 3702 - protein, 18 aa, synthetic construct
KTSNGHDSPHKSVQNKQT

SEQ ID NO: 3703 - protein, 18 aa, synthetic construct
KIVNGQVSPHKSGQNQQT

SEQ ID NO: 3704 - protein, 18 aa, synthetic construct
KTVNGHDSPHKSGQRQLT

SEQ ID NO: 3705 - protein, 18 aa, synthetic construct
KTVNGHDSPHKIGQNQLT

SEQ ID NO: 3706 - protein, 18 aa, synthetic construct
KTINGHDSPHKSGQIIVT

SEQ ID NO: 3707 - protein, 18 aa, synthetic construct
KTEKIHDSPHKSGQNQQT

SEQ ID NO: 3708 - protein, 18 aa, synthetic construct
KTENAHDSPHKSGQNQQT

SEQ ID NO: 3709 - protein, 18 aa, synthetic construct
KIGNGHESPHKSGQNQQT

SEQ ID NO: 3710 - protein, 18 aa, synthetic construct
KEVMGHDSPHKSGQNQQT

SEQ ID NO: 3711 - protein, 18 aa, synthetic construct
KTEVKHDSPHKSGQNQQT

SEQ ID NO: 3712 - protein, 18 aa, synthetic construct
KTINGYDSPHKSGQKQST

SEQ ID NO: 3713 - protein, 18 aa, synthetic construct
KYQVGHDSPHKSGQNQQT

SEQ ID NO: 3714 - protein, 18 aa, synthetic construct
KTEAMHDSPHKSGQNQQT

SEQ ID NO: 3715 - protein, 18 aa, synthetic construct
KTIKGDDSPHKSVQNQQT

SEQ ID NO: 3716 - protein, 18 aa, synthetic construct
KTINGHDSPHKSVQSHQT

SEQ ID NO: 3717 - protein, 18 aa, synthetic construct
KTINGHDSPHKSGQFVVT

SEQ ID NO: 3718 - protein, 18 aa, synthetic construct
KTVNGHDSPHKSRQNLQT

SEQ ID NO: 3719 - protein, 18 aa, synthetic construct
KATNGHNSPHKSGQNQET

SEQ ID NO: 3720 - protein, 18 aa, synthetic construct
KAINGHDSPHKSAQNQQI

SEQ ID NO: 3721 - protein, 18 aa, synthetic construct
KTEHGHDSPHKSGQNQQT

SEQ ID NO: 3722 - protein, 18 aa, synthetic construct
KTVENHDSPHKSGQNQQT

SEQ ID NO: 3723 - protein, 18 aa, synthetic construct
KTIYGHDSPHKSGQSQPT

SEQ ID NO: 3724 - protein, 18 aa, synthetic construct
KTISGHESPHKSGQNEQT

SEQ ID NO: 3725 - protein, 18 aa, synthetic construct
KAIIGHDSPHKSAQNQQT

SEQ ID NO: 3726 - protein, 18 aa, synthetic construct
KAIDGHDSPHKSGQNQLT

SEQ ID NO: 3727 - protein, 18 aa, synthetic construct
KTIMGHDSPHKSVQNQQT

SEQ ID NO: 3728 - protein, 18 aa, synthetic construct
KEVGGHDSPHKSGQNQQT

SEQ ID NO: 3729 - protein, 18 aa, synthetic construct
KTINGHDSPHKSAQNLLT

SEQ ID NO: 3730 - protein, 18 aa, synthetic construct
KTEFTHDSPHKSGQNQQT

SEQ ID NO: 3731 - protein, 18 aa, synthetic construct
KSEMGHDSPHKSGQNQQT

SEQ ID NO: 3732 - protein, 18 aa, synthetic construct
KAQQGHDSPHKSGQNQQT

SEQ ID NO: 3733 - protein, 18 aa, synthetic construct
KTEVMHDSPHKSGQNQQT

SEQ ID NO: 3734 - protein, 18 aa, synthetic construct
KAINGHDSPHKSGQSLQT

SEQ ID NO: 3735 - protein, 18 aa, synthetic construct
KCGEGHDSPHKSGQNQQT

SEQ ID NO: 3736 - protein, 18 aa, synthetic construct
KTVNGHDSPHKSAQNHQT

SEQ ID NO: 3737 - protein, 18 aa, synthetic construct
KTVNGHDSPHKSGQTQLT

SEQ ID NO: 3738 - protein, 18 aa, synthetic construct
KTNNGHDSPHKSGRNRQT

SEQ ID NO: 3739 - protein, 18 aa, synthetic construct
KTCNEHDSPHKSGQNQQT

SEQ ID NO: 3740 - protein, 18 aa, synthetic construct
KTINGHDSPHKYGQNEQT

SEQ ID NO: 3741 - protein, 18 aa, synthetic construct
KASNRHDSPHKSGHNQQT

SEQ ID NO: 3742 - protein, 18 aa, synthetic construct
KTETKHDSPHKSGQNQQT

SEQ ID NO: 3743 - protein, 18 aa, synthetic construct
KSINGHDSPHKSQQNQQT

SEQ ID NO: 3744 - protein, 18 aa, synthetic construct
KTIGGHDSPHKSGQNQQI

SEQ ID NO: 3745 - protein, 18 aa, synthetic construct
KTDPQHDSPHKSGQNQQT

SEQ ID NO: 3746 - protein, 18 aa, synthetic construct
KTINRHDSPHKIVQNQQT

SEQ ID NO: 3747 - protein, 18 aa, synthetic construct
KTEQYHDSPHKSGQNQQT

SEQ ID NO: 3748 - protein, 18 aa, synthetic construct
KTINGHDSPHKSVQSKQT

SEQ ID NO: 3749 - protein, 18 aa, synthetic construct
KELVGHDSPHKSGQNQQT

SEQ ID NO: 3750 - protein, 18 aa, synthetic construct
KTENRHDSPHKSGQNQQT

SEQ ID NO: 3751 - protein, 18 aa, synthetic construct
KELMGHDSPHKSGQNQQT

SEQ ID NO: 3752 - protein, 18 aa, synthetic construct
KTINGNDSPHKIGHNQQT

SEQ ID NO: 3753 - protein, 18 aa, synthetic construct
KTEGHHDSPHKSGQNQQT

SEQ ID NO: 3754 - protein, 18 aa, synthetic construct
KTEGYHDSPHKSGQNQQT

SEQ ID NO: 3755 - protein, 18 aa, synthetic construct
KTVNGHDSPHKSGQTQQI

SEQ ID NO: 3756 - protein, 18 aa, synthetic construct
KTINGQDSPHKSGQNPLT

SEQ ID NO: 3757 - protein, 18 aa, synthetic construct
KTINGHDSPHKSGRDQKT

SEQ ID NO: 3758 - protein, 18 aa, synthetic construct
KTINGHDSPHKSVHNQQN

SEQ ID NO: 3759 - protein, 18 aa, synthetic construct
KTINGHDSPHKSGQWKRT

SEQ ID NO: 3760 - protein, 18 aa, synthetic construct
KNEIGHDSPHKSGQNQQT

SEQ ID NO: 3761 - protein, 18 aa, synthetic construct
KAINGHDSPHKSGQSQQI

SEQ ID NO: 3762 - protein, 18 aa, synthetic construct
KIINGHDSPHKSRQAQQT

SEQ ID NO: 3763 - protein, 18 aa, synthetic construct
KTPNGHDSPHKSGQNQQI

SEQ ID NO: 3764 - protein, 18 aa, synthetic construct
KITNGHDSPHKSGQTQQT

SEQ ID NO: 3765 - protein, 18 aa, synthetic construct
KTINGHDSPHKSVQNHQI

SEQ ID NO: 3766 - protein, 18 aa, synthetic construct
KTINGHDSPHKSKQNQQA

SEQ ID NO: 3767 - protein, 18 aa, synthetic construct
KTINGHDSPHKSAQNQLN

SEQ ID NO: 3768 - protein, 18 aa, synthetic construct
KTDITHDSPHKSGQNQQT

SEQ ID NO: 3769 - protein, 18 aa, synthetic construct
KTVNGHDSPHKSGQTQPT

SEQ ID NO: 3770 - protein, 18 aa, synthetic construct
KTEKFHDSPHKSGQNQQT

SEQ ID NO: 3771 - protein, 18 aa, synthetic construct
KTDQGHDSPHKSGQNQQT

SEQ ID NO: 3772 - protein, 18 aa, synthetic construct
KTINGHDSPHKLWINQQT

SEQ ID NO: 3773 - protein, 18 aa, synthetic construct
KGINGPDSPHKSGQNQQT

SEQ ID NO: 3774 - protein, 18 aa, synthetic construct
KSEIGHDSPHKSGQNQQT

SEQ ID NO: 3775 - protein, 18 aa, synthetic construct
KTINGHDSPHKSVQKQLT

SEQ ID NO: 3776 - protein, 18 aa, synthetic construct
KTVNGHDSPHKSGRNQLA

SEQ ID NO: 3777 - protein, 18 aa, synthetic construct
KTNNVHDSPHKSGQNQQS

SEQ ID NO: 3778 - protein, 18 aa, synthetic construct
KSEKGHDSPHKSGQNQQT

SEQ ID NO: 3779 - protein, 18 aa, synthetic construct
KWSAGHDSPHKSGQNQQT

SEQ ID NO: 3780 - protein, 18 aa, synthetic construct
KELAGHDSPHKSGQNQQT

SEQ ID NO: 3781 - protein, 18 aa, synthetic construct
KTINGHDSPHKMGRNQQS

SEQ ID NO: 3782 - protein, 18 aa, synthetic construct
KTDQAHDSPHKSGQNQQT

SEQ ID NO: 3783 - protein, 18 aa, synthetic construct
KTETQHDSPHKSGQNQQT

SEQ ID NO: 3784 - protein, 18 aa, synthetic construct
KTEMTHDSPHKSGQNQQT

SEQ ID NO: 3785 - protein, 18 aa, synthetic construct
KTINGHDSPHKSGISIQT

SEQ ID NO: 3786 - protein, 18 aa, synthetic construct
KTDAVHDSPHKSGQNQQT

SEQ ID NO: 3787 - protein, 18 aa, synthetic construct
KTSNGHDSPHKSVQNLQT

SEQ ID NO: 3788 - protein, 18 aa, synthetic construct
KTEKYHDSPHKSGQNQQT

SEQ ID NO: 3789 - protein, 18 aa, synthetic construct
KQTQGHDSPHKSGQNQQT

SEQ ID NO: 3790 - protein, 18 aa, synthetic construct
KTINGHDSPHKMAHNQQT

SEQ ID NO: 3791 - protein, 18 aa, synthetic construct
KTINGHDSPHKHGQNQQN

SEQ ID NO: 3792 - protein, 18 aa, synthetic construct
KGADGHDSPHKSGQNQQT

SEQ ID NO: 3793 - protein, 18 aa, synthetic construct
KVGEGHDSPHKSGQNQQT

SEQ ID NO: 3794 - protein, 18 aa, synthetic construct
KANEGHDSPHKSGQNQQT

SEQ ID NO: 3795 - protein, 18 aa, synthetic construct
KTDTMHDSPHKSGQNQQT

SEQ ID NO: 3796 - protein, 18 aa, synthetic construct
KTINGHDSPHKSVQSQQS

SEQ ID NO: 3797 - protein, 18 aa, synthetic construct
KTCIAHDSPHKSGQNQQT

SEQ ID NO: 3798 - protein, 18 aa, synthetic construct
KTINGHDSPHKSGQTVCT

SEQ ID NO: 3799 - protein, 18 aa, synthetic construct
KELRGHDSPHKSGQNQQT

SEQ ID NO: 3800 - protein, 18 aa, synthetic construct
KCQIGHDSPHKSGQNQQT

SEQ ID NO: 3801 - protein, 18 aa, synthetic construct
KGVMGHDSPHKSGQNQQT

SEQ ID NO: 3802 - protein, 18 aa, synthetic construct
KACDGHDSPHKSGQNQQT

SEQ ID NO: 3803 - protein, 18 aa, synthetic construct
KTINGQDSPHKSGQYQQI

SEQ ID NO: 3804 - protein, 18 aa, synthetic construct
KTINGHDSPHKSGQQIMT

SEQ ID NO: 3805 - protein, 18 aa, synthetic construct
KTINGHDSPHKSRQNEQS

SEQ ID NO: 3806 - protein, 18 aa, synthetic construct
KASNGHDSPHKSGLNHQT

SEQ ID NO: 3807 - protein, 18 aa, synthetic construct
KTVNGHDSPHKSGQSQPT

SEQ ID NO: 3808 - protein, 18 aa, synthetic construct
KNELGHDSPHKSGQNQQT

SEQ ID NO: 3809 - protein, 18 aa, synthetic construct
KTETFHDSPHKSGQNQQT

SEQ ID NO: 3810 - protein, 18 aa, synthetic construct
KAAEGHDSPHKSGQNQQT

SEQ ID NO: 3811 - protein, 18 aa, synthetic construct
KGQNGHDSPHKSGQNQQT

SEQ ID NO: 3812 - protein, 18 aa, synthetic construct
KNEFGHDSPHKSGQNQQT

SEQ ID NO: 3813 - protein, 18 aa, synthetic construct
KTSIGYDSPHKSGQNQQT

SEQ ID NO: 3814 - protein, 18 aa, synthetic construct
KTDNGHDSPHKSGQNLQT

SEQ ID NO: 3815 - protein, 18 aa, synthetic construct
KTEGQHDSPHKSGQNQQT

SEQ ID NO: 3816 - protein, 18 aa, synthetic construct
KTITGHDSPHKSRQDQQT

SEQ ID NO: 3817 - protein, 18 aa, synthetic construct
KAEHGHDSPHKSGQNQQT

SEQ ID NO: 3818 - protein, 18 aa, synthetic construct
KTINGDDSPHKSGQKQLT

SEQ ID NO: 3819 - protein, 18 aa, synthetic construct
KCDQGHDSPHKSGQNQQT

SEQ ID NO: 3820 - protein, 18 aa, synthetic construct
KEILGHDSPHKSGQNQQT

SEQ ID NO: 3821 - protein, 18 aa, synthetic construct
KTERNHDSPHKSGQNQQT

SEQ ID NO: 3822 - protein, 18 aa, synthetic construct
KAINGDDSPHKSGHNQQT

SEQ ID NO: 3823 - protein, 18 aa, synthetic construct
KTSNGHNSPHKSGQNQET

SEQ ID NO: 3824 - protein, 18 aa, synthetic construct
KTINGHDSPHKSGQMIHT

SEQ ID NO: 3825 - protein, 18 aa, synthetic construct
KNAIGHDSPHKSGQNQQT

SEQ ID NO: 3826 - protein, 18 aa, synthetic construct
KTDKFHDSPHKSGQNQQT

SEQ ID NO: 3827 - protein, 18 aa, synthetic construct
KTEGFHDSPHKSGQNQQT

SEQ ID NO: 3828 - protein, 18 aa, synthetic construct
KVINGHDSPHKSGRNHQS

SEQ ID NO: 3829 - protein, 18 aa, synthetic construct
KTITGHDSPHKSVQNRQT

SEQ ID NO: 3830 - protein, 18 aa, synthetic construct
KTPDMHDSPHKSGQNQQT

SEQ ID NO: 3831 - protein, 18 aa, synthetic construct
KTINGHDSPHKSGQKMNT

SEQ ID NO: 3832 - protein, 18 aa, synthetic construct
KTELQHDSPHKSGQNQQT

SEQ ID NO: 3833 - protein, 18 aa, synthetic construct
KTIHGHDSPHKSGQSQQN

SEQ ID NO: 3834 - protein, 18 aa, synthetic construct
KTEIGHDSPHKSGQNQQT

SEQ ID NO: 3835 - protein, 18 aa, synthetic construct
KTINGHDSPHKSGQYQHA

SEQ ID NO: 3836 - protein, 18 aa, synthetic construct
KTELYHDSPHKSGQNQQT

SEQ ID NO: 3837 - protein, 18 aa, synthetic construct
KTINGRGSPHKRGQNQQT

SEQ ID NO: 3838 - protein, 18 aa, synthetic construct
KTINGHGSPHSKAQNPQT

SEQ ID NO: 3839 - protein, 18 aa, synthetic construct
KTFNGSASPHSKALNQQT

SEQ ID NO: 3840 - protein, 18 aa, synthetic construct
KTINGCGSPHASGQNQQT

SEQ ID NO: 3841 - protein, 18 aa, synthetic construct
KTINGNGSPHSKAQNHQA

SEQ ID NO: 3842 - protein, 18 aa, synthetic construct
KTINGMGSPHSKTQNQQT

SEQ ID NO: 3843 - protein, 18 aa, synthetic construct
KTVNGTGSPHSKAQNQLT

SEQ ID NO: 3844 - protein, 18 aa, synthetic construct
KTIHGNGSPHSKAQNQET

SEQ ID NO: 3845 - protein, 18 aa, synthetic construct
KAINGNGSPHKRGQNQQT

SEQ ID NO: 3846 - protein, 18 aa, synthetic construct
KTINGNGSPHSKAPNLQT

SEQ ID NO: 3847 - protein, 18 aa, synthetic construct
KTIKGGGSPHSKAQDQQT

SEQ ID NO: 3848 - protein, 18 aa, synthetic construct
KTINGHPSPHWKGQNQQT

SEQ ID NO: 3849 - protein, 18 aa, synthetic construct
KTINGSGSPHIVWQNQQT

SEQ ID NO: 3850 - protein, 18 aa, synthetic construct
KTINGSGSPHSKYFMQQT

SEQ ID NO: 3851 - protein, 18 aa, synthetic construct
KTINGSGSPHSKARQRQT

SEQ ID NO: 3852 - protein, 18 aa, synthetic construct
KTINGSGSPHSCHQNQQT

SEQ ID NO: 3853 - protein, 18 aa, synthetic construct
KTINGSGSPHFPWQNQQT

SEQ ID NO: 3854 - protein, 18 aa, synthetic construct
KTINGSGSPHSKIRRQQT

SEQ ID NO: 3855 - protein, 18 aa, synthetic construct
KTINGSGSPHVYYQNQQT

SEQ ID NO: 3856 - protein, 18 aa, synthetic construct
KTINGSGSPHSLYWNQQT

SEQ ID NO: 3857 - protein, 18 aa, synthetic construct
KTINGSGSPHSKPKRQQT

SEQ ID NO: 3858 - protein, 18 aa, synthetic construct
KPRWGSGSPHSKAQNQQT

SEQ ID NO: 3859 - protein, 18 aa, synthetic construct
KTINGSGSPHSKAFSWQT

SEQ ID NO: 3860 - protein, 18 aa, synthetic construct
KTINGSGSPHSRFWNQQT

SEQ ID NO: 3861 - protein, 18 aa, synthetic construct
KTINGSGSPHSKAQCLKT

SEQ ID NO: 3862 - protein, 18 aa, synthetic construct
KTINGSGSPHSRMRNQQT

SEQ ID NO: 3863 - protein, 18 aa, synthetic construct
KTINGSGSPHSVKKNQQT

SEQ ID NO: 3864 - protein, 18 aa, synthetic construct
KTINGSGSPHSWAPNQQT

SEQ ID NO: 3865 - protein, 18 aa, synthetic construct
KTINGSGSPHSLWKNQQT

SEQ ID NO: 3866 - protein, 18 aa, synthetic construct
KTINGSGSPHSKARWQQT

SEQ ID NO: 3867 - protein, 18 aa, synthetic construct
KTINGSGSPHSFRPNQQT

SEQ ID NO: 3868 - protein, 18 aa, synthetic construct
KTINGSGSPHSKKVFQQT

SEQ ID NO: 3869 - protein, 18 aa, synthetic construct
KTINGSGSPHSYAFNQQT

SEQ ID NO: 3870 - protein, 18 aa, synthetic construct
KTINGSGSPHSKACSRQT

SEQ ID NO: 3871 - protein, 18 aa, synthetic construct
KYSAGSGSPHSKAQNQQT

SEQ ID NO: 3872 - protein, 18 aa, synthetic construct
KTINGSGSPHSKRLWQQT

SEQ ID NO: 3873 - protein, 18 aa, synthetic construct
KTINGSGSPHSCSRNQQT

SEQ ID NO: 3874 - protein, 18 aa, synthetic construct
KTINGSGSPHSRCPNQQT

SEQ ID NO: 3875 - protein, 18 aa, synthetic construct
KTINGSGSPHSGACNQQT

SEQ ID NO: 3876 - protein, 18 aa, synthetic construct
KYYTGSGSPHSKAQNQQT

SEQ ID NO: 3877 - protein, 18 aa, synthetic construct
KTINGSGSPHSKFRQQQT

SEQ ID NO: 3878 - protein, 18 aa, synthetic construct
KTINGSGSPHSFPFNQQT

SEQ ID NO: 3879 - protein, 18 aa, synthetic construct
KTINGSGSPHSFFGNQQT

SEQ ID NO: 3880 - protein, 18 aa, synthetic construct
KTINGSGSPHSMCQNQQT

SEQ ID NO: 3881 - protein, 18 aa, synthetic construct
KTINGSGSPHSKLFWQQT

SEQ ID NO: 3882 - protein, 18 aa, synthetic construct
KTINGSGSPHSKTRKQQT

SEQ ID NO: 3883 - protein, 18 aa, synthetic construct
KTINGSGSPHSGKRNQQT

SEQ ID NO: 3884 - protein, 18 aa, synthetic construct
KTINGSGSPHSKAQNFKR

SEQ ID NO: 3885 - protein, 18 aa, synthetic construct
KTINGSGSPHFYRQNQQT

SEQ ID NO: 3886 - protein, 18 aa, synthetic construct
KTINGSGSPHCRVQNQQT

SEQ ID NO: 3887 - protein, 18 aa, synthetic construct
KTINGSGSPHYGIQNQQT

SEQ ID NO: 3888 - protein, 18 aa, synthetic construct
KTINGSGSPHSKAQRFKT

SEQ ID NO: 3889 - protein, 18 aa, synthetic construct
KTINGSGSPHVNCQNQQT

SEQ ID NO: 3890 - protein, 18 aa, synthetic construct
KTINGSGSPHSKPFRQQT

SEQ ID NO: 3891 - protein, 18 aa, synthetic construct
KTINGSGSPHSLAWNQQT

SEQ ID NO: 3892 - protein, 18 aa, synthetic construct
KTINGSGSPHSKRSYQQT

SEQ ID NO: 3893 - protein, 18 aa, synthetic construct
KTINGSGSPHWSYQNQQT

SEQ ID NO: 3894 - protein, 18 aa, synthetic construct
KTINGSGSPHRWLQNQQT

SEQ ID NO: 3895 - protein, 18 aa, synthetic construct
KTINGSGSPHPSCQNQQT

SEQ ID NO: 3896 - protein, 18 aa, synthetic construct
KTINGSGSPHSSWLNQQT

SEQ ID NO: 3897 - protein, 18 aa, synthetic construct
KPRFGSGSPHSKAQNQQT

SEQ ID NO: 3898 - protein, 18 aa, synthetic construct
KWLTGSGSPHSKAQNQQT

SEQ ID NO: 3899 - protein, 18 aa, synthetic construct
KTINGSGSPHSKRRAQQT

SEQ ID NO: 3900 - protein, 18 aa, synthetic construct
KTINGSGSPHSKAQTCRT

SEQ ID NO: 3901 - protein, 18 aa, synthetic construct
KTINGSGSPHSKGCTQQT

SEQ ID NO: 3902 - protein, 18 aa, synthetic construct
KTINGSGSPHVPWQNQQT

SEQ ID NO: 3903 - protein, 18 aa, synthetic construct
KTINGSGSPHSKRYTQQT

SEQ ID NO: 3904 - protein, 18 aa, synthetic construct
KTINGSGSPHSGCQNQQT

SEQ ID NO: 3905 - protein, 18 aa, synthetic construct
KTINGSGSPHSFTPNQQT

SEQ ID NO: 3906 - protein, 18 aa, synthetic construct
KTINGSGSPHSTTCNQQT

SEQ ID NO: 3907 - protein, 18 aa, synthetic construct
KTINGSGSPHSKARMYQT

SEQ ID NO: 3908 - protein, 18 aa, synthetic construct
KTINGSGSPHPKRQNQQT

SEQ ID NO: 3909 - protein, 18 aa, synthetic construct
KTINGSGSPHSKCFLQQT

SEQ ID NO: 3910 - protein, 18 aa, synthetic construct
KTINGSGSPHWVPQNQQT

SEQ ID NO: 3911 - protein, 18 aa, synthetic construct
KTINGSGSPHSFWSNQQT

SEQ ID NO: 3912 - protein, 18 aa, synthetic construct
KRSYGSGSPHSKAQNQQT

SEQ ID NO: 3913 - protein, 18 aa, synthetic construct
KYVFGSGSPHSKAQNQQT

SEQ ID NO: 3914 - protein, 18 aa, synthetic construct
KTINGSGSPHSKFKNQQT

SEQ ID NO: 3915 - protein, 18 aa, synthetic construct
KTINGSGSPHRIKQNQQT

SEQ ID NO: 3916 - protein, 18 aa, synthetic construct
KTINGSGSPHSKAPRRQT

SEQ ID NO: 3917 - protein, 18 aa, synthetic construct
KTINGSGSPHSFRYNQQT

SEQ ID NO: 3918 - protein, 18 aa, synthetic construct
KTINGSGSPHSKMICQQT

SEQ ID NO: 3919 - protein, 18 aa, synthetic construct
KTINGSGSPHLRWQNQQT

SEQ ID NO: 3920 - protein, 18 aa, synthetic construct
KTINGSGSPHLPTQNQQT

SEQ ID NO: 3921 - protein, 18 aa, synthetic construct
KTINGSGSPHSKWKSQQT

SEQ ID NO: 3922 - protein, 18 aa, synthetic construct
KTINGSGSPHSYMRNQQT

SEQ ID NO: 3923 - protein, 18 aa, synthetic construct
KTINGSGSPHSKAARRQT

SEQ ID NO: 3924 - protein, 18 aa, synthetic construct
KTINGSGSPHLLCQNQQT

SEQ ID NO: 3925 - protein, 18 aa, synthetic construct
KTINGSGSPHRCCQNQQT

SEQ ID NO: 3926 - protein, 18 aa, synthetic construct
KTINGSGSPHLCVQNQQT

SEQ ID NO: 3927 - protein, 18 aa, synthetic construct
KTINGSGSPHSKLTRQQT

SEQ ID NO: 3928 - protein, 18 aa, synthetic construct
KTINGSGSPHSKLCTQQT

SEQ ID NO: 3929 - protein, 18 aa, synthetic construct
KKHLGSGSPHSKAQNQQT

SEQ ID NO: 3930 - protein, 18 aa, synthetic construct
KTINGSGSPHSKIRGQQT

SEQ ID NO: 3931 - protein, 18 aa, synthetic construct
KTINGSGSPHSYLVNQQT

SEQ ID NO: 3932 - protein, 18 aa, synthetic construct
KTINGSGSPHQGCQNQQT

SEQ ID NO: 3933 - protein, 18 aa, synthetic construct
KTINGSGSPHMAFQNQQT

SEQ ID NO: 3934 - protein, 18 aa, synthetic construct
KTINGSGSPHSKACQFQT

SEQ ID NO: 3935 - protein, 18 aa, synthetic construct
KTINGSGSPHSKWGLQQT

SEQ ID NO: 3936 - protein, 18 aa, synthetic construct
KTINGSGSPHSKILRQQT

SEQ ID NO: 3937 - protein, 18 aa, synthetic construct
KTINGSGSPHSFQINQQT

SEQ ID NO: 3938 - protein, 18 aa, synthetic construct
KTINGSGSPHSKACISQT

SEQ ID NO: 3939 - protein, 18 aa, synthetic construct
KTINGSGSPHSKAQTHRT

SEQ ID NO: 3940 - protein, 18 aa, synthetic construct
KTINGSGSPHSKALRCQT

SEQ ID NO: 3941 - protein, 18 aa, synthetic construct
KTINGSGSPHSKAFYIQT

SEQ ID NO: 3942 - protein, 18 aa, synthetic construct
KTINGSGSPHSKAHARQT

SEQ ID NO: 3943 - protein, 18 aa, synthetic construct
KTINGSGSPHSLCLNQQT

SEQ ID NO: 3944 - protein, 18 aa, synthetic construct
KTINGSGSPHSKAFVRQT

SEQ ID NO: 3945 - protein, 18 aa, synthetic construct
KPPLGSGSPHSKAQNQQT

SEQ ID NO: 3946 - protein, 18 aa, synthetic construct
KTINGSGSPHRPWQNQQT

SEQ ID NO: 3947 - protein, 18 aa, synthetic construct
KPARGSGSPHSKAQNQQT

SEQ ID NO: 3948 - protein, 18 aa, synthetic construct
KTINGSGSPHRPRQNQQT

SEQ ID NO: 3949 - protein, 18 aa, synthetic construct
KTINGSGSPHSCPQNQQT

SEQ ID NO: 3950 - protein, 18 aa, synthetic construct
KTINGSGSPHSKAQFILT

SEQ ID NO: 3951 - protein, 18 aa, synthetic construct
KTINGSGSPHSVRYNQQT

SEQ ID NO: 3952 - protein, 18 aa, synthetic construct
KSRRGSGSPHSKAQNQQT

SEQ ID NO: 3953 - protein, 18 aa, synthetic construct
KTINGSGSPHSVRCNQQT

SEQ ID NO: 3954 - protein, 18 aa, synthetic construct
KFFHGSGSPHSKAQNQQT

SEQ ID NO: 3955 - protein, 18 aa, synthetic construct
KTINGSGSPHSKMPCQQT

SEQ ID NO: 3956 - protein, 18 aa, synthetic construct
KTINGSGSPHSKKTSQQT

SEQ ID NO: 3957 - protein, 18 aa, synthetic construct
KRYNGSGSPHSKAQNQQT

SEQ ID NO: 3958 - protein, 18 aa, synthetic construct
KTINGSGSPHSLPYNQQT

SEQ ID NO: 3959 - protein, 18 aa, synthetic construct
KTINGSGSPHVYHQNQQT

SEQ ID NO: 3960 - protein, 18 aa, synthetic construct
KTINGSGSPHSKAQSRKT

SEQ ID NO: 3961 - protein, 18 aa, synthetic construct
KTINGSGSPHSYTRNQQT

SEQ ID NO: 3962 - protein, 18 aa, synthetic construct
KTINGSGSPHLVYQNQQT

SEQ ID NO: 3963 - protein, 18 aa, synthetic construct
KTINGSGSPHSKALRWQT

SEQ ID NO: 3964 - protein, 18 aa, synthetic construct
KTINGSGSPHYRYQNQQT

SEQ ID NO: 3965 - protein, 18 aa, synthetic construct
KTINGSGSPHSWLKNQQT

SEQ ID NO: 3966 - protein, 18 aa, synthetic construct
KTINGSGSPHSKAQMQIT

SEQ ID NO: 3967 - protein, 18 aa, synthetic construct
KTINGSGSPHCPAQNQQT

SEQ ID NO: 3968 - protein, 18 aa, synthetic construct
KTINGSGSPHSMCTNQQT

SEQ ID NO: 3969 - protein, 18 aa, synthetic construct
KTINGSGSPHSPPDNQQT

SEQ ID NO: 3970 - protein, 18 aa, synthetic construct
KTINGSGSPHSKRNYQQT

SEQ ID NO: 3971 - protein, 18 aa, synthetic construct
KTINGSGSPHRWTQNQQT

SEQ ID NO: 3972 - protein, 18 aa, synthetic construct
KTINGSGSPHSKACRLQT

SEQ ID NO: 3973 - protein, 18 aa, synthetic construct
KTINGSGSPHPRKQNQQT

SEQ ID NO: 3974 - protein, 18 aa, synthetic construct
KTINGSGSPHSKCSVQQT

SEQ ID NO: 3975 - protein, 18 aa, synthetic construct
KTINGSGSPHSKAQYVRT

SEQ ID NO: 3976 - protein, 18 aa, synthetic construct
KTINGSGSPHSKARISQT

SEQ ID NO: 3977 - protein, 18 aa, synthetic construct
KTINGSGSPHPFVQNQQT

SEQ ID NO: 3978 - protein, 18 aa, synthetic construct
KTINGSGSPHSKLPKQQT

SEQ ID NO: 3979 - protein, 18 aa, synthetic construct
KTINGSGSPHSKSEQQQT

SEQ ID NO: 3980 - protein, 18 aa, synthetic construct
KTINGSGSPHWVAQNQQT

SEQ ID NO: 3981 - protein, 18 aa, synthetic construct
KTINGSGSPHSLYQNQQT

SEQ ID NO: 3982 - protein, 18 aa, synthetic construct
KTINGSGSPHSKVRMQQT

SEQ ID NO: 3983 - protein, 18 aa, synthetic construct
KTINYTRSPHSKAQNQQT

SEQ ID NO: 3984 - protein, 18 aa, synthetic construct
KTINGSGSPHSSCTNQQT

SEQ ID NO: 3985 - protein, 18 aa, synthetic construct
KTINGSGSPHSKNSRQQT

SEQ ID NO: 3986 - protein, 18 aa, synthetic construct
KTINGSGSPHSKRKRQQT

SEQ ID NO: 3987 - protein, 18 aa, synthetic construct
KTINGSGSPHLCTQNQQT

SEQ ID NO: 3988 - protein, 18 aa, synthetic construct
KTINGSGSPHSKAQSAKT

SEQ ID NO: 3989 - protein, 18 aa, synthetic construct
KTINGSGSPHSTCLNQQT

SEQ ID NO: 3990 - protein, 18 aa, synthetic construct
KTINGSGSPHSYARNQQT

SEQ ID NO: 3991 - protein, 18 aa, synthetic construct
KTINGSGSPHSKQRPQQT

SEQ ID NO: 3992 - protein, 18 aa, synthetic construct
KTINGSGSPHSKRVVQQT

SEQ ID NO: 3993 - protein, 18 aa, synthetic construct
KRFSGSGSPHSKAQNQQT

SEQ ID NO: 3994 - protein, 18 aa, synthetic construct
KTINGSGSPHKSGQNPQT

SEQ ID NO: 3995 - protein, 18 aa, synthetic construct
KTINGSGSPHSKALRHQT

SEQ ID NO: 3996 - protein, 18 aa, synthetic construct
KTINGSGSPHSYYSNQQT

SEQ ID NO: 3997 - protein, 18 aa, synthetic construct
KTINGSGSPHSLTCNQQT

SEQ ID NO: 3998 - protein, 18 aa, synthetic construct
KTINGSGSPHSCQSNQQT

SEQ ID NO: 3999 - protein, 18 aa, synthetic construct
KTINGSGSPHSKAQSIKT

SEQ ID NO: 4000 - protein, 18 aa, synthetic construct
KYSMGSGSPHSKAQNQQT

SEQ ID NO: 4001 - protein, 18 aa, synthetic construct
KTINGSGSPHSKAKGWQT

SEQ ID NO: 4002 - protein, 18 aa, synthetic construct
KTIVGSGSPHSKPQNQQT

SEQ ID NO: 4003 - protein, 18 aa, synthetic construct
KTINGSGSPHFPFQNQQT

SEQ ID NO: 4004 - protein, 18 aa, synthetic construct
KPFLGSGSPHSKAQNQQT

SEQ ID NO: 4005 - protein, 18 aa, synthetic construct
KTINGSGSPHSKCTSQQT

SEQ ID NO: 4006 - protein, 18 aa, synthetic construct
KTINGSGSPHSVFENQQT

SEQ ID NO: 4007 - protein, 18 aa, synthetic construct
KTINGSGSPHSKAKKVQT

SEQ ID NO: 4008 - protein, 18 aa, synthetic construct
KTINGSGSPHSKAQRCST

SEQ ID NO: 4009 - protein, 18 aa, synthetic construct
KTINGSGSPHSKAQFCLT

SEQ ID NO: 4010 - protein, 18 aa, synthetic construct
KTINGSGSPHGRYQNQQT

SEQ ID NO: 4011 - protein, 18 aa, synthetic construct
KTQRKSGSPHSKAQNQQT

SEQ ID NO: 4012 - protein, 18 aa, synthetic construct
KTINGSYSPHCLAQNQQT

SEQ ID NO: 4013 - protein, 18 aa, synthetic construct
KTINGSLSPHFWAQNQQT

SEQ ID NO: 4014 - protein, 18 aa, synthetic construct
KTINHRISPHSKAQNQQT

SEQ ID NO: 4015 - protein, 18 aa, synthetic construct
KTRRPSGSPHSKAQNQQT

SEQ ID NO: 4016 - protein, 18 aa, synthetic construct
KTINGAYSPHRKAQNQQT

SEQ ID NO: 4017 - protein, 18 aa, synthetic construct
KTINGRRSPHGKAQNQQT

SEQ ID NO: 4018 - protein, 18 aa, synthetic construct
KTINGRTSPHRKAQNQQT

SEQ ID NO: 4019 - protein, 18 aa, synthetic construct
KTINGSRSPHAWAQNQQT

SEQ ID NO: 4020 - protein, 18 aa, synthetic construct
KTINKCLSPHSKAQNQQT

SEQ ID NO: 4021 - protein, 18 aa, synthetic construct
KTINGSSSPHRCAQNQQT

SEQ ID NO: 4022 - protein, 18 aa, synthetic construct
KTINCRTSPHSKAQNQQT

SEQ ID NO: 4023 - protein, 18 aa, synthetic construct
KTIFDCGSPHSKAQNQQT

SEQ ID NO: 4024 - protein, 18 aa, synthetic construct
KTINSPRSPHSKAQNQQT

SEQ ID NO: 4025 - protein, 18 aa, synthetic construct
KTINGLDSPHRSRQNQQT

SEQ ID NO: 4026 - protein, 18 aa, synthetic construct
KTRTRSGSPHSKAQNQQT

SEQ ID NO: 4027 - protein, 18 aa, synthetic construct
KTINGSISPHCPAQNQQT

SEQ ID NO: 4028 - protein, 18 aa, synthetic construct
KTINGLVSPHRKAQNQQT

SEQ ID NO: 4029 - protein, 18 aa, synthetic construct
KTINALRSPHSKAQNQQT

SEQ ID NO: 4030 - protein, 18 aa, synthetic construct
KTICGRGSPHSKAQNQQT

SEQ ID NO: 4031 - protein, 18 aa, synthetic construct
KTTRKSGSPHSKAQNQQT

SEQ ID NO: 4032 - protein, 18 aa, synthetic construct
KTMQRSGSPHSKAQNQQT

SEQ ID NO: 4033 - protein, 18 aa, synthetic construct
KTINGSSSPHWMAQNQQT

SEQ ID NO: 4034 - protein, 18 aa, synthetic construct
KTRKRSGSPHSKAQNQQT

SEQ ID NO: 4035 - protein, 18 aa, synthetic construct
KTINFTRSPHSKAQNQQT

SEQ ID NO: 4036 - protein, 18 aa, synthetic construct
KTINNLRSPHSKAQNQQT

SEQ ID NO: 4037 - protein, 18 aa, synthetic construct
KTINGRPSPHGKAQNQQT

SEQ ID NO: 4038 - protein, 18 aa, synthetic construct
KTINWSRSPHSKAQNQQT

SEQ ID NO: 4039 - protein, 18 aa, synthetic construct
KTINGTRSPHKKAQNQQT

SEQ ID NO: 4040 - protein, 18 aa, synthetic construct
KTINGSVSPHCTAQNQQT

SEQ ID NO: 4041 - protein, 18 aa, synthetic construct
KTTRCSGSPHSKAQNQQT

SEQ ID NO: 4042 - protein, 18 aa, synthetic construct
KTKLCSGSPHSKAQNQQT

SEQ ID NO: 4043 - protein, 18 aa, synthetic construct
KTINLGCSPHSKAQNQQT

SEQ ID NO: 4044 - protein, 18 aa, synthetic construct
KTISGHDSPHISGQYQQT

SEQ ID NO: 4045 - protein, 18 aa, synthetic construct
KTINGRRSPHMKAQNQQT

SEQ ID NO: 4046 - protein, 18 aa, synthetic construct
KTINGPWSPHRKAQNQQT

SEQ ID NO: 4047 - protein, 18 aa, synthetic construct
KTINSCFSPHSKAQNQQT

SEQ ID NO: 4048 - protein, 18 aa, synthetic construct
KTIKRYGSPHSKAQNQQT

SEQ ID NO: 4049 - protein, 18 aa, synthetic construct
KTINRYSSPHSKAQNQQT

SEQ ID NO: 4050 - protein, 18 aa, synthetic construct
KTTGRSGSPHSKAQNQQT

SEQ ID NO: 4051 - protein, 18 aa, synthetic construct
KTINRQFSPHSKAQNQQT

SEQ ID NO: 4052 - protein, 18 aa, synthetic construct
KTITGHDSPHSKAQNQQT

SEQ ID NO: 4053 - protein, 18 aa, synthetic construct
KTINGSGSPHKSGQYQQT

SEQ ID NO: 4054 - protein, 18 aa, synthetic construct
KTINGSGSPHKSGQDQQT

SEQ ID NO: 4055 - protein, 18 aa, synthetic construct
KTINGSGSPHKSGQIQQT

SEQ ID NO: 4056 - protein, 18 aa, synthetic construct
KTINGSGSPHKSGRNQQT

SEQ ID NO: 4057 - protein, 18 aa, synthetic construct
KTINGSGSPHKSGKNQQT

SEQ ID NO: 4058 - protein, 18 aa, synthetic construct
KTIYGHDSPHSKAQNQQT

SEQ ID NO: 4059 - protein, 18 aa, synthetic construct
KTINGSGSPHKSGQNQQS

SEQ ID NO: 4060 - protein, 18 aa, synthetic construct
KTINGSGSPHKSGQNLQT

SEQ ID NO: 4061 - protein, 18 aa, synthetic construct
KAINGHDSPHSKAQNQQT

SEQ ID NO: 4062 - protein, 18 aa, synthetic construct
KTVNGHDSPHSKAQNQQT

SEQ ID NO: 4063 - protein, 18 aa, synthetic construct
KTIKGHDSPHSKAQNQQT

SEQ ID NO: 4064 - protein, 18 aa, synthetic construct
KSINGHDSPHSKAQNQQT

SEQ ID NO: 4065 - protein, 18 aa, synthetic construct
KTINGSGSPHKSGQTQQT

SEQ ID NO: 4066 - protein, 18 aa, synthetic construct
KTINGSGSPHKSGHNQQT

SEQ ID NO: 4067 - protein, 18 aa, synthetic construct
KTFNGHDSPHSKAQNQQT

SEQ ID NO: 4068 - protein, 18 aa, synthetic construct
KTINGSGSPHKSGLNQQT

SEQ ID NO: 4069 - protein, 18 aa, synthetic construct
KTINGHDSPHSKALNQQT

SEQ ID NO: 4070 - protein, 18 aa, synthetic construct
KTINGSGSPHKSGQNQLT

SEQ ID NO: 4071 - protein, 18 aa, synthetic construct
KTLNGHDSPHSKAQNQQT

SEQ ID NO: 4072 - protein, 18 aa, synthetic construct
KTINGSGSPHKSGQNQHT

SEQ ID NO: 4073 - protein, 18 aa, synthetic construct
KTIDGHDSPHSKAQNQQT

SEQ ID NO: 4074 - protein, 18 aa, synthetic construct
KTNNGHDSPHSKAQNQQT

SEQ ID NO: 4075 - protein, 18 aa, synthetic construct
KTINGSGSPHKSGQKQQT

SEQ ID NO: 4076 - protein, 18 aa, synthetic construct
KTINGSGSPHKSGQNRQT

SEQ ID NO: 4077 - protein, 18 aa, synthetic construct
KTINGSGSPHKSGQNQQN

SEQ ID NO: 4078 - protein, 18 aa, synthetic construct
KTINGSGSPHKSGQNQQA

SEQ ID NO: 4079 - protein, 18 aa, synthetic construct
KTINGHDSPHSKAHNQQT

SEQ ID NO: 4080 - protein, 18 aa, synthetic construct
KTINGHDSPHSKAQNQQT

SEQ ID NO: 4081 - protein, 18 aa, synthetic construct
KTINGSGSPHKSGQNQQP

SEQ ID NO: 4082 - protein, 18 aa, synthetic construct
KTINGHDSPHCKAQNQQT

SEQ ID NO: 4083 - protein, 18 aa, synthetic construct
KTINGHDSPHSKAQNQQS

SEQ ID NO: 4084 - protein, 18 aa, synthetic construct
KTINGSGSPHKSGQNQQT

SEQ ID NO: 4085 - protein, 18 aa, synthetic construct
KTINGHDSPDKSGQNQQT

SEQ ID NO: 4086 - protein, 18 aa, synthetic construct
KPINGHDSPHKSGQNHQS

SEQ ID NO: 4087 - protein, 18 aa, synthetic construct
KTSNGSGSPHKSGQNQQT

SEQ ID NO: 4088 - protein, 18 aa, synthetic construct
KTVNGSGSPHKSGQNQQT

SEQ ID NO: 4089 - protein, 18 aa, synthetic construct
KTINGHDSTHKSGHNQQT

SEQ ID NO: 4090 - protein, 18 aa, synthetic construct
KTINGHDSPHSKAQNQQN

SEQ ID NO: 4091 - protein, 18 aa, synthetic construct
KTIYGSGSPHKSGQNQQT

SEQ ID NO: 4092 - protein, 18 aa, synthetic construct
KTINGLDSQHKSGQNQQT

SEQ ID NO: 4093-4094 - skipped (2 entries)

SEQ ID NO: 4095 - protein, 18 aa, synthetic construct
KTIIGHDSPHSKAQNQQT

SEQ ID NO: 4096 - protein, 18 aa, synthetic construct
KTSNGHDSPHSKAQNQQT

SEQ ID NO: 4097 - protein, 18 aa, synthetic construct
KTINGSGSPHSKAQNRRR

SEQ ID NO: 4098 - protein, 18 aa, synthetic construct
KTISKRGSPHSKAQNQQT

SEQ ID NO: 4099 - protein, 18 aa, synthetic construct
KGLGGSGSPHSKAQNQQT

SEQ ID NO: 4100 - protein, 18 aa, synthetic construct
KTINGHDSPHSKAQNLQT

SEQ ID NO: 4101 - protein, 18 aa, synthetic construct
KTINGHDSPHSKAQNQQI

SEQ ID NO: 4102 - protein, 18 aa, synthetic construct
KTINGSGSPHFTRQNQQT

SEQ ID NO: 4103 - protein, 18 aa, synthetic construct
KTINGSGSPHSLPWNQQT

SEQ ID NO: 4104 - protein, 18 aa, synthetic construct
KTINGHDSPHSKAQNHQT

SEQ ID NO: 4105 - protein, 18 aa, synthetic construct
KTMNGHDSPHSKAQNQQT

SEQ ID NO: 4106 - protein, 18 aa, synthetic construct
KPYKGSGSPHSKAQNQQT

SEQ ID NO: 4107 - protein, 18 aa, synthetic construct
KRLWGSGSPHSKAQNQQT

SEQ ID NO: 4108 - protein, 18 aa, synthetic construct
KRMRGSGSPHSKAQNQQT

SEQ ID NO: 4109 - protein, 18 aa, synthetic construct
KRTYGSGSPHSKAQNQQT

SEQ ID NO: 4110 - protein, 18 aa, synthetic construct
KTINCLRSPHSKAQNQQT

SEQ ID NO: 4111 - protein, 18 aa, synthetic construct
KTINFSRSPHSKAQNQQT

SEQ ID NO: 4112 - protein, 18 aa, synthetic construct
KTINGLRSPHFKAQNQQT

SEQ ID NO: 4113 - protein, 18 aa, synthetic construct
KTINGNRSPHNKAQNQQT

SEQ ID NO: 4114 - protein, 18 aa, synthetic construct
KTINGPRSPHYKAQNQQT

SEQ ID NO: 4115 - protein, 18 aa, synthetic construct
KTINGQASPHWKAQNQQT

SEQ ID NO: 4116 - protein, 18 aa, synthetic construct
KTINGRCSPHSKAQNQQT

SEQ ID NO: 4117 - protein, 18 aa, synthetic construct
KTINGRHSPHSKAQNQQT

SEQ ID NO: 4118 - protein, 18 aa, synthetic construct
KTINGRKSPHRKAQNQQT

SEQ ID NO: 4119 - protein, 18 aa, synthetic construct
KTINGRLSPHWKAQNQQT

SEQ ID NO: 4120 - protein, 18 aa, synthetic construct
KTINGRLSPHYKAQNQQT

SEQ ID NO: 4121 - protein, 18 aa, synthetic construct
KTINGRPSPHMKAQNQQT

SEQ ID NO: 4122 - protein, 18 aa, synthetic construct
KTINGRSSPHWKAQNQQT

SEQ ID NO: 4123 - protein, 18 aa, synthetic construct
KTINGRWSPHSKAQNQQT

SEQ ID NO: 4124 - protein, 18 aa, synthetic construct
KTINGSGSPHAPCQNQQT

SEQ ID NO: 4125 - protein, 18 aa, synthetic construct
KTINGSGSPHAWAQNQQT

SEQ ID NO: 4126 - protein, 18 aa, synthetic construct
KTINGSGSPHCMRQNQQT

SEQ ID NO: 4127 - protein, 18 aa, synthetic construct
KTINGSGSPHFCSQNQQT

SEQ ID NO: 4128 - protein, 18 aa, synthetic construct
KTINGSGSPHFLFQNQQT

SEQ ID NO: 4129 - protein, 18 aa, synthetic construct
KTINGSGSPHFWAQNQQT

SEQ ID NO: 4130 - protein, 18 aa, synthetic construct
KTINGSGSPHLCAQNQQT

SEQ ID NO: 4131 - protein, 18 aa, synthetic construct
KTINGSGSPHLRYQNQQT

SEQ ID NO: 4132 - protein, 18 aa, synthetic construct
KTINGSGSPHLYYQNQQT

SEQ ID NO: 4133 - protein, 18 aa, synthetic construct
KTINGSGSPHPLCQNQQT

SEQ ID NO: 4134 - protein, 18 aa, synthetic construct
KTINGSGSPHRIRQNQQT

SEQ ID NO: 4135 - protein, 18 aa, synthetic construct
KTINGSGSPHRLFQNQQT

SEQ ID NO: 4136 - protein, 18 aa, synthetic construct
KTINGSGSPHSCGQNQQT

SEQ ID NO: 4137 - protein, 18 aa, synthetic construct
KTINGSGSPHSCLRNQQT

SEQ ID NO: 4138 - protein, 18 aa, synthetic construct
KTINGSGSPHSCLSNQQT

SEQ ID NO: 4139 - protein, 18 aa, synthetic construct
KTINGSGSPHSCRLNQQT

SEQ ID NO: 4140 - protein, 18 aa, synthetic construct
KTINGSGSPHSCSLNQQT

SEQ ID NO: 4141 - protein, 18 aa, synthetic construct
KTINGSGSPHSKACTLQT

SEQ ID NO: 4142 - protein, 18 aa, synthetic construct
KTINGSGSPHSKAFRAQT

SEQ ID NO: 4143 - protein, 18 aa, synthetic construct
KTINGSGSPHSKAIRKQT

SEQ ID NO: 4144 - protein, 18 aa, synthetic construct
KTINGSGSPHSKAQASRT

SEQ ID NO: 4145 - protein, 18 aa, synthetic construct
KTINGSGSPHSKAQFELT

SEQ ID NO: 4146 - protein, 18 aa, synthetic construct
KTINGSGSPHSKAQIVIT

SEQ ID NO: 4147 - protein, 18 aa, synthetic construct
KTINGSGSPHSKAQLART

SEQ ID NO: 4148 - protein, 18 aa, synthetic construct
KTINGSGSPHSKAQLQRT

SEQ ID NO: 4149 - protein, 18 aa, synthetic construct
KTINGSGSPHSKAQNARR

SEQ ID NO: 4150 - protein, 18 aa, synthetic construct
KTINGSGSPHSKAQNCPR

SEQ ID NO: 4151 - protein, 18 aa, synthetic construct
KTINGSGSPHSKAQNMRR

SEQ ID NO: 4152 - protein, 18 aa, synthetic construct
KTINGSGSPHSKAQNRRV

SEQ ID NO: 4153 - protein, 18 aa, synthetic construct
KTINGSGSPHSKAQPSRT

SEQ ID NO: 4154 - protein, 18 aa, synthetic construct
KTINGSGSPHSKAQQVKT

SEQ ID NO: 4155 - protein, 18 aa, synthetic construct
KTINGSGSPHSKAQQVRT

SEQ ID NO: 4156 - protein, 18 aa, synthetic construct
KTINGSGSPHSKAQRLKT

SEQ ID NO: 4157 - protein, 18 aa, synthetic construct
KTINGSGSPHSKAQRRAT

SEQ ID NO: 4158 - protein, 18 aa, synthetic construct
KTINGSGSPHSKAQRRGT

SEQ ID NO: 4159 - protein, 18 aa, synthetic construct
KTINGSGSPHSKAQRRRT

SEQ ID NO: 4160 - protein, 18 aa, synthetic construct
KTINGSGSPHSKAQRTRT

SEQ ID NO: 4161 - protein, 18 aa, synthetic construct
KTINGSGSPHSKAQRVHT

SEQ ID NO: 4162 - protein, 18 aa, synthetic construct
KTINGSGSPHSKAQTYRT

SEQ ID NO: 4163 - protein, 18 aa, synthetic construct
KTINGSGSPHSKAQVRKT

SEQ ID NO: 4164 - protein, 18 aa, synthetic construct
KTINGSGSPHSKARGRQT

SEQ ID NO: 4165 - protein, 18 aa, synthetic construct
KTINGSGSPHSKARLCQT

SEQ ID NO: 4166 - protein, 18 aa, synthetic construct
KTINGSGSPHSKARLKQT

SEQ ID NO: 4167 - protein, 18 aa, synthetic construct
KTINGSGSPHSKARNSQT

SEQ ID NO: 4168 - protein, 18 aa, synthetic construct
KTINGSGSPHSKARWVQT

SEQ ID NO: 4169 - protein, 18 aa, synthetic construct
KTINGSGSPHSKAVRWQT

SEQ ID NO: 4170 - protein, 18 aa, synthetic construct
KTINGSGSPHSKAYTRQT

SEQ ID NO: 4171 - protein, 18 aa, synthetic construct
KTINGSGSPHSKCQSQQT

SEQ ID NO: 4172 - protein, 18 aa, synthetic construct
KTINGSGSPHSKFLRQQT

SEQ ID NO: 4173 - protein, 18 aa, synthetic construct
KTINGSGSPHSKFRFQQT

SEQ ID NO: 4174 - protein, 18 aa, synthetic construct
KTINGSGSPHSKFRLQQT

SEQ ID NO: 4175 - protein, 18 aa, synthetic construct
KTINGSGSPHSKFRRQQT

SEQ ID NO: 4176 - protein, 18 aa, synthetic construct
KTINGSGSPHSKGMKQQT

SEQ ID NO: 4177 - protein, 18 aa, synthetic construct
KTINGSGSPHSKKLRQQT

SEQ ID NO: 4178 - protein, 18 aa, synthetic construct
KTINGSGSPHSKKRPQQT

SEQ ID NO: 4179 - protein, 18 aa, synthetic construct
KTINGSGSPHSKKSRQQT

SEQ ID NO: 4180 - protein, 18 aa, synthetic construct
KTINGSGSPHSKLYRQQT

SEQ ID NO: 4181 - protein, 18 aa, synthetic construct
KTINGSGSPHSKLYWQQT

SEQ ID NO: 4182 - protein, 18 aa, synthetic construct
KTINGSGSPHSKPRMQQT

SEQ ID NO: 4183 - protein, 18 aa, synthetic construct
KTINGSGSPHSKRFPQQT

SEQ ID NO: 4184 - protein, 18 aa, synthetic construct
KTINGSGSPHSKRFRQQT

SEQ ID NO: 4185 - protein, 18 aa, synthetic construct
KTINGSGSPHSKRPYQQT

SEQ ID NO: 4186 - protein, 18 aa, synthetic construct
KTINGSGSPHSKRRMQQT

SEQ ID NO: 4187 - protein, 18 aa, synthetic construct
KTINGSGSPHSKRSKQQT

SEQ ID NO: 4188 - protein, 18 aa, synthetic construct
KTINGSGSPHSKRSRQQT

SEQ ID NO: 4189 - protein, 18 aa, synthetic construct
KTINGSGSPHSKRTMQQT

SEQ ID NO: 4190 - protein, 18 aa, synthetic construct
KTINGSGSPHSKRTRQQT

SEQ ID NO: 4191 - protein, 18 aa, synthetic construct
KTINGSGSPHSKRVRQQT

SEQ ID NO: 4192 - protein, 18 aa, synthetic construct
KTINGSGSPHSKRYIQQT

SEQ ID NO: 4193 - protein, 18 aa, synthetic construct
KTINGSGSPHSKRYNQQT

SEQ ID NO: 4194 - protein, 18 aa, synthetic construct
KTINGSGSPHSKRYPQQT

SEQ ID NO: 4195 - protein, 18 aa, synthetic construct
KTINGSGSPHSKRYSQQT

SEQ ID NO: 4196 - protein, 18 aa, synthetic construct
KTINGSGSPHSKTCIQQT

SEQ ID NO: 4197 - protein, 18 aa, synthetic construct
KTINGSGSPHSKWLTQQT

SEQ ID NO: 4198 - protein, 18 aa, synthetic construct
KTINGSGSPHSKWVVQQT

SEQ ID NO: 4199 - protein, 18 aa, synthetic construct
KTINGSGSPHSKYRLQQT

SEQ ID NO: 4200 - protein, 18 aa, synthetic construct
KTINGSGSPHSKYSKQQT

SEQ ID NO: 4201 - protein, 18 aa, synthetic construct
KTINGSGSPHSKYSRQQT

SEQ ID NO: 4202 - protein, 18 aa, synthetic construct
KTINGSGSPHSLKRNQQT

SEQ ID NO: 4203 - protein, 18 aa, synthetic construct
KTINGSGSPHSLWFNQQT

SEQ ID NO: 4204 - protein, 18 aa, synthetic construct
KTINGSGSPHSLWPNQQT

SEQ ID NO: 4205 - protein, 18 aa, synthetic construct
KTINGSGSPHSLWTNQQT

SEQ ID NO: 4206 - protein, 18 aa, synthetic construct
KTINGSGSPHSMRRNQQT

SEQ ID NO: 4207 - protein, 18 aa, synthetic construct
KTINGSGSPHSPCLNQQT

SEQ ID NO: 4208 - protein, 18 aa, synthetic construct
KTINGSGSPHSQWQNQQT

SEQ ID NO: 4209 - protein, 18 aa, synthetic construct
KTINGSGSPHSRCANQQT

SEQ ID NO: 4210 - protein, 18 aa, synthetic construct
KTINGSGSPHSRIRNQQT

SEQ ID NO: 4211 - protein, 18 aa, synthetic construct
KTINGSGSPHSRKSNQQT

SEQ ID NO: 4212 - protein, 18 aa, synthetic construct
KTINGSGSPHSRLWNQQT

SEQ ID NO: 4213 - protein, 18 aa, synthetic construct
KTINGSGSPHSRRFNQQT

SEQ ID NO: 4214 - protein, 18 aa, synthetic construct
KTINGSGSPHSRRPNQQT

SEQ ID NO: 4215 - protein, 18 aa, synthetic construct
KTINGSGSPHSRSCNQQT

SEQ ID NO: 4216 - protein, 18 aa, synthetic construct
KTINGSGSPHSRSKNQQT

SEQ ID NO: 4217 - protein, 18 aa, synthetic construct
KTINGSGSPHSRTKNQQT

SEQ ID NO: 4218 - protein, 18 aa, synthetic construct
KTINGSGSPHSRWLNQQT

SEQ ID NO: 4219 - protein, 18 aa, synthetic construct
KTINGSGSPHSSVCNQQT

SEQ ID NO: 4220 - protein, 18 aa, synthetic construct
KTINGSGSPHSSWRNQQT

SEQ ID NO: 4221 - protein, 18 aa, synthetic construct
KTINGSGSPHSVCQNQQT

SEQ ID NO: 4222 - protein, 18 aa, synthetic construct
KTINGSGSPHSVLCNQQT

SEQ ID NO: 4223 - protein, 18 aa, synthetic construct
KTINGSGSPHSVRRNQQT

SEQ ID NO: 4224 - protein, 18 aa, synthetic construct
KTINGSGSPHSVSCNQQT

SEQ ID NO: 4225 - protein, 18 aa, synthetic construct
KTINGSGSPHSWALNQQT

SEQ ID NO: 4226 - protein, 18 aa, synthetic construct
KTINGSGSPHSWITNQQT

SEQ ID NO: 4227 - protein, 18 aa, synthetic construct
KTINGSGSPHSWPMNQQT

SEQ ID NO: 4228 - protein, 18 aa, synthetic construct
KTINGSGSPHSWRSNQQT

SEQ ID NO: 4229 - protein, 18 aa, synthetic construct
KTINGSGSPHSYFLNQQT

SEQ ID NO: 4230 - protein, 18 aa, synthetic construct
KTINGSGSPHSYTYNQQT

SEQ ID NO: 4231 - protein, 18 aa, synthetic construct
KTINGSGSPHSYWQNQQT

SEQ ID NO: 4232 - protein, 18 aa, synthetic construct
KTINGSGSPHTLCQNQQT

SEQ ID NO: 4233 - protein, 18 aa, synthetic construct
KTINGSGSPHWLRQNQQT

SEQ ID NO: 4234 - protein, 18 aa, synthetic construct
KTINGSGSPHWPSQNQQT

SEQ ID NO: 4235 - protein, 18 aa, synthetic construct
KTINGSGSPHYLRQNQQT

SEQ ID NO: 4236 - protein, 18 aa, synthetic construct
KTINGSGSPHYTRQNQQT

SEQ ID NO: 4237 - protein, 18 aa, synthetic construct
KTINGSLSPHLWAQNQQT

SEQ ID NO: 4238 - protein, 18 aa, synthetic construct
KTINGSPSPHCQAQNQQT

SEQ ID NO: 4239 - protein, 18 aa, synthetic construct
KTINGSRSPHLCAQNQQT

SEQ ID NO: 4240 - protein, 18 aa, synthetic construct
KTINGSRSPHWRAQNQQT

SEQ ID NO: 4241 - protein, 18 aa, synthetic construct
KTINGSVSPHWLAQNQQT

SEQ ID NO: 4242 - protein, 18 aa, synthetic construct
KTINGTFSPHRKAQNQQT

SEQ ID NO: 4243 - protein, 18 aa, synthetic construct
KTINGWTSPHRKAQNQQT

SEQ ID NO: 4244 - protein, 18 aa, synthetic construct
KTINRGISPHSKAQNQQT

SEQ ID NO: 4245 - protein, 18 aa, synthetic construct
KTINTVRSPHSKAQNQQT

SEQ ID NO: 4246 - protein, 18 aa, synthetic construct
KTKLRSGSPHSKAQNQQT

SEQ ID NO: 4247 - protein, 18 aa, synthetic construct
KTRLRSGSPHSKAQNQQT

SEQ ID NO: 4248 - protein, 18 aa, synthetic construct
KWLLGSGSPHSKAQNQQT

SEQ ID NO: 4249 - protein, 18 aa, synthetic construct
KWSQGSGSPHSKAQNQQT

SEQ ID NO: 4250 - protein, 18 aa, synthetic construct
KWYLGSGSPHSKAQNQQT

SEQ ID NO: 4251 - protein, 18 aa, synthetic construct
KYHSGSGSPHSKAQNQQT

SEQ ID NO: 4252 - protein, 18 aa, synthetic construct
KYLPGSGSPHSKAQNQQT

SEQ ID NO: 4253 - protein, 18 aa, synthetic construct
KAINGGGSPHSKTQNQQT

SEQ ID NO: 4254 - protein, 18 aa, synthetic construct
KAINGHDSPHKRSPNQQT

SEQ ID NO: 4255 - protein, 18 aa, synthetic construct
KAINGHDSPHKSFSPQQT

SEQ ID NO: 4256 - protein, 18 aa, synthetic construct
KAINGHDSPHKSGENQQP

SEQ ID NO: 4257 - protein, 18 aa, synthetic construct
KAINGHDSPHKSGQLART

SEQ ID NO: 4258 - protein, 18 aa, synthetic construct
KAINGHDSPHKSGQNAFL

SEQ ID NO: 4259 - protein, 18 aa, synthetic construct
KAINGHDSPHKSGQNAYT

SEQ ID NO: 4260 - protein, 18 aa, synthetic construct
KAINGHDSPHKSGQNFAS

SEQ ID NO: 4261 - protein, 18 aa, synthetic construct
KAINGHDSPHKSGQNLAS

SEQ ID NO: 4262 - protein, 18 aa, synthetic construct
KAINGHDSPHKSGQNLGS

SEQ ID NO: 4263 - protein, 18 aa, synthetic construct
KAINGHDSPHKSGQNLKF

SEQ ID NO: 4264 - protein, 18 aa, synthetic construct
KAINGHDSPHKSGQNLLK

SEQ ID NO: 4265 - protein, 18 aa, synthetic construct
KAINGHDSPHKSGQNLSR

SEQ ID NO: 4266 - protein, 18 aa, synthetic construct
KAINGHDSPHKSGQNLSS

SEQ ID NO: 4267 - protein, 18 aa, synthetic construct
KAINGHDSPHKSGQNSLG

SEQ ID NO: 4268 - protein, 18 aa, synthetic construct
KAINGHDSPHKSGQNTLQ

SEQ ID NO: 4269 - protein, 18 aa, synthetic construct
KAINGHDSPHKSGQNTSL

SEQ ID NO: 4270 - protein, 18 aa, synthetic construct
KAINGHDSPHKSGQRLGT

SEQ ID NO: 4271 - protein, 18 aa, synthetic construct
KAINGHDSPHKSGQRNYT

SEQ ID NO: 4272 - protein, 18 aa, synthetic construct
KAINGHDSPHKSGQRPST

SEQ ID NO: 4273 - protein, 18 aa, synthetic construct
KAINGHDSPHKSGQRPVT

SEQ ID NO: 4274 - protein, 18 aa, synthetic construct
KAINGHDSPHKSGQVPST

SEQ ID NO: 4275 - protein, 18 aa, synthetic construct
KAINGHDSPHKSLSNQQT

SEQ ID NO: 4276 - protein, 18 aa, synthetic construct
KAINGHDSPHKSVLSQQT

SEQ ID NO: 4277 - protein, 18 aa, synthetic construct
KAINGHDSPHKTLQNQQT

SEQ ID NO: 4278 - protein, 18 aa, synthetic construct
KAINGHNSPHSKAQNQQT

SEQ ID NO: 4279 - protein, 18 aa, synthetic construct
KAINGLDSPHSKAQNQQT

SEQ ID NO: 4280 - protein, 18 aa, synthetic construct
KAINGSGSPHKSGQNQQT

SEQ ID NO: 4281 - protein, 18 aa, synthetic construct
KAINGSGSPHSKAQGQQT

SEQ ID NO: 4282 - protein, 18 aa, synthetic construct
KAINGSGSPHSKAQLSGT

SEQ ID NO: 4283 - protein, 18 aa, synthetic construct
KAINGSGSPHSKAQNGSL

SEQ ID NO: 4284 - protein, 18 aa, synthetic construct
KAINGSGSPHSKAQNSLL

SEQ ID NO: 4285 - protein, 18 aa, synthetic construct
KAINGSGSPHSKAVGLQT

SEQ ID NO: 4286 - protein, 18 aa, synthetic construct
KAINGSGSPHSKSLLQQT

SEQ ID NO: 4287 - protein, 18 aa, synthetic construct
KAINGSGSPHSKSLPQQT

SEQ ID NO: 4288 - protein, 18 aa, synthetic construct
KAINGSGSPHSKSTFQQT

SEQ ID NO: 4289 - protein, 18 aa, synthetic construct
KAITGHDSPHSKAQNQQT

SEQ ID NO: 4290 - protein, 18 aa, synthetic construct
KDVMGSGSPHSKAQNQQT

SEQ ID NO: 4291 - protein, 18 aa, synthetic construct
KEIVGSGSPHSKAQNQQT

SEQ ID NO: 4292 - protein, 18 aa, synthetic construct
KEIYGSGSPHSKAQNQQT

SEQ ID NO: 4293 - protein, 18 aa, synthetic construct
KELSGSGSPHSKAQNQQT

SEQ ID NO: 4294 - protein, 18 aa, synthetic construct
KETIGSGSPHSKAQNQQT

SEQ ID NO: 4295 - protein, 18 aa, synthetic construct
KEVLGSGSPHSKAQNQQT

SEQ ID NO: 4296 - protein, 18 aa, synthetic construct
KFALGHDSPHKSGQKQQT

SEQ ID NO: 4297 - protein, 18 aa, synthetic construct
KIINGHDSPHKSGQNLVL

SEQ ID NO: 4298 - protein, 18 aa, synthetic construct
KIINGHDSPHKSGQRNYT

SEQ ID NO: 4299 - protein, 18 aa, synthetic construct
KIINGHDSPHSKAQNQQT

SEQ ID NO: 4300 - protein, 18 aa, synthetic construct
KLNPGHDSPHKSGQTQQT

SEQ ID NO: 4301 - protein, 18 aa, synthetic construct
KLNRGHDSPHKSGQNQQS

SEQ ID NO: 4302 - protein, 18 aa, synthetic construct
KLSSGHDSPHKSGQNQQN

SEQ ID NO: 4303 - protein, 18 aa, synthetic construct
KNINGHDSPHSKAQNQQT

SEQ ID NO: 4304 - protein, 18 aa, synthetic construct
KNNDGSGSPHSKAQNQQT

SEQ ID NO: 4305 - protein, 18 aa, synthetic construct
KNVMGSGSPHSKAQNQQT

SEQ ID NO: 4306 - protein, 18 aa, synthetic construct
KPINGHDSPHKSGQNKLS

SEQ ID NO: 4307 - protein, 18 aa, synthetic construct
KPINGHDSPHKSGQNLSS

SEQ ID NO: 4308 - protein, 18 aa, synthetic construct
KPINGHDSPHSKAQNQQT

SEQ ID NO: 4309 - protein, 18 aa, synthetic construct
KRINGHDSPHSKAQNQQT

SEQ ID NO: 4310 - protein, 18 aa, synthetic construct
KSCSGHDSPHKSGQNQQS

SEQ ID NO: 4311 - protein, 18 aa, synthetic construct
KSINGHDSPHKSGQNLAS

SEQ ID NO: 4312 - protein, 18 aa, synthetic construct
KSINGHDSPHKSGQNLFL

SEQ ID NO: 4313 - protein, 18 aa, synthetic construct
KSINGHDSPHKSGQNLLM

SEQ ID NO: 4314 - protein, 18 aa, synthetic construct
KSINGHDSPHKSGQNLLQ

SEQ ID NO: 4315 - protein, 18 aa, synthetic construct
KSINGHDSPHKSGQNSLG

SEQ ID NO: 4316 - protein, 18 aa, synthetic construct
KSINGHDSPHKSGQNTLQ

SEQ ID NO: 4317 - protein, 18 aa, synthetic construct
KSINGHDSPHKSSSNQQT

SEQ ID NO: 4318 - protein, 18 aa, synthetic construct
KSINGHDSPHKYKLNQQT

SEQ ID NO: 4319 - protein, 18 aa, synthetic construct
KSINGSGSPHKSGQKQQT

SEQ ID NO: 4320 - protein, 18 aa, synthetic construct
KSINGSGSPHKSGQNQQT

SEQ ID NO: 4321 - protein, 18 aa, synthetic construct
KSINGSGSPHSKAQGLST

SEQ ID NO: 4322 - protein, 18 aa, synthetic construct
KSINGSGSPHSKAQLLGT

SEQ ID NO: 4323 - protein, 18 aa, synthetic construct
KSINGSGSPHSKTSWQQT

SEQ ID NO: 4324 - protein, 18 aa, synthetic construct
KSMNGHDSPHSKAQNQQT

SEQ ID NO: 4325 - protein, 18 aa, synthetic construct
KSTLGSGSPHSKAQNQHT

SEQ ID NO: 4326 - protein, 18 aa, synthetic construct
KSTLGSGSPHSKAQNQQN

SEQ ID NO: 4327 - protein, 18 aa, synthetic construct
KSTVGSGSPHSKAQTQQT

SEQ ID NO: 4328 - protein, 18 aa, synthetic construct
KTCKESGSPHSKAQNQQT

SEQ ID NO: 4329 - protein, 18 aa, synthetic construct
KTCKGSGSPHSKAQNQQT

SEQ ID NO: 4330 - protein, 18 aa, synthetic construct
KTCKSSGSPHSKAQNQQT

SEQ ID NO: 4331 - protein, 18 aa, synthetic construct
KTDMGSGSPHSKAQNQQT

SEQ ID NO: 4332 - protein, 18 aa, synthetic construct
KTDNGIGSPHSKAQNQQT

SEQ ID NO: 4333 - protein, 18 aa, synthetic construct
KTEGGSGSPHSKAQNQQT

SEQ ID NO: 4334 - protein, 18 aa, synthetic construct
KTEHHSGSPHSKAQNQQT

SEQ ID NO: 4335 - protein, 18 aa, synthetic construct
KTEKDSGSPHSKAQNQQT

SEQ ID NO: 4336 - protein, 18 aa, synthetic construct
KTELGHDSPHKRGQNQQT

SEQ ID NO: 4337 - protein, 18 aa, synthetic construct
KTESVSGSPHSKAQNQQT

SEQ ID NO: 4338 - protein, 18 aa, synthetic construct
KTETNSGSPHSKAQNQQT

SEQ ID NO: 4339 - protein, 18 aa, synthetic construct
KTETYSGSPHSKAQNQQT

SEQ ID NO: 4340 - protein, 18 aa, synthetic construct
KTEWLSGSPHSKAQNQQT

SEQ ID NO: 4341 - protein, 18 aa, synthetic construct
KTFNGSGSPHKSGQNQQT

SEQ ID NO: 4342 - protein, 18 aa, synthetic construct
KTGLRHDSPHKSGQKQQT

SEQ ID NO: 4343 - protein, 18 aa, synthetic construct
KTGLRHDSPHKSGQNQQS

SEQ ID NO: 4344 - protein, 18 aa, synthetic construct
KTGVTHDSPHKSGQKQQT

SEQ ID NO: 4345 - protein, 18 aa, synthetic construct
KTIDGHESPHSKAQNQQT

SEQ ID NO: 4346 - protein, 18 aa, synthetic construct
KTIEGHDSPHKSGQTQQT

SEQ ID NO: 4347 - protein, 18 aa, synthetic construct
KTIHGHDSPHSKAQNQQT

SEQ ID NO: 4348 - protein, 18 aa, synthetic construct
KTIHGHESPHSKAQNQQT

SEQ ID NO: 4349 - protein, 18 aa, synthetic construct
KTIIGHDSPHKSGQNRSS

SEQ ID NO: 4350 - protein, 18 aa, synthetic construct
KTIIGHDSPHKSGQRLGT

SEQ ID NO: 4351 - protein, 18 aa, synthetic construct
KTIIGSGSPHKSGQNQQT

SEQ ID NO: 4352 - protein, 18 aa, synthetic construct
KTIKGHDSPHKSGQNMLF

SEQ ID NO: 4353 - protein, 18 aa, synthetic construct
KTILGSGSPHSKAQNLQT

SEQ ID NO: 4354 - protein, 18 aa, synthetic construct
KTINGCSSPHWKAQNQQT

SEQ ID NO: 4355 - protein, 18 aa, synthetic construct
KTINGGGSTHSKAQNQQT

SEQ ID NO: 4356 - protein, 18 aa, synthetic construct
KTINGHDSPHKAGQSQQT

SEQ ID NO: 4357 - protein, 18 aa, synthetic construct
KTINGHDSPHKRGQNVPS

SEQ ID NO: 4358 - protein, 18 aa, synthetic construct
KTINGHDSPHKRGRSYQT

SEQ ID NO: 4359 - protein, 18 aa, synthetic construct
KTINGHDSPHKTGQNPPT

SEQ ID NO: 4360 - protein, 18 aa, synthetic construct
KTINGHDSPHSKAENQQT

SEQ ID NO: 4361 - protein, 18 aa, synthetic construct
KTINGHDSPHSKALSLQT

SEQ ID NO: 4362 - protein, 18 aa, synthetic construct
KTINGHDSPHSKAQGQQT

SEQ ID NO: 4363 - protein, 18 aa, synthetic construct
KTINGHDSPHSKAQHQQT

SEQ ID NO: 4364 - protein, 18 aa, synthetic construct
KTINGHDSPHSKAQIQQT

SEQ ID NO: 4365 - protein, 18 aa, synthetic construct
KTINGHDSPHSKAQKQQT

SEQ ID NO: 4366 - protein, 18 aa, synthetic construct
KTINGHDSPHSKAQNLSS

SEQ ID NO: 4367 - protein, 18 aa, synthetic construct
KTINGHDSPHSKAQNPQT

SEQ ID NO: 4368 - protein, 18 aa, synthetic construct
KTINGHDSPHSKAQNQET

SEQ ID NO: 4369 - protein, 18 aa, synthetic construct
KTINGHDSPHSKAQNQHT

SEQ ID NO: 4370 - protein, 18 aa, synthetic construct
KTINGHDSPHSKAQNQLT

SEQ ID NO: 4371 - protein, 18 aa, synthetic construct
KTINGHDSPHSKAQNQPT

SEQ ID NO: 4372 - protein, 18 aa, synthetic construct
KTINGHDSPHSKAQNQQA

SEQ ID NO: 4373 - protein, 18 aa, synthetic construct
KTINGHDSPHSKAQNTGS

SEQ ID NO: 4374 - protein, 18 aa, synthetic construct
KTINGHDSPHSKAQSQQT

SEQ ID NO: 4375 - protein, 18 aa, synthetic construct
KTINGHDSPHSKAQTQQT

SEQ ID NO: 4376 - protein, 18 aa, synthetic construct
KTINGHDSPHSKAQYQQT

SEQ ID NO: 4377 - protein, 18 aa, synthetic construct
KTINGHDSPHSKARNQQT

SEQ ID NO: 4378 - protein, 18 aa, synthetic construct
KTINGHDSPHSKLPGQQT

SEQ ID NO: 4379 - protein, 18 aa, synthetic construct
KTINGHDSPHSKSPNQQT

SEQ ID NO: 4380 - protein, 18 aa, synthetic construct
KTINGHESPHKSGQNAFL

SEQ ID NO: 4381 - protein, 18 aa, synthetic construct
KTINGIGSPHSKAPNEQT

SEQ ID NO: 4382 - protein, 18 aa, synthetic construct
KTINGQDSPHKSGQNLHM

SEQ ID NO: 4383 - protein, 18 aa, synthetic construct
KTINGRGSPHSKAQIGMT

SEQ ID NO: 4384 - protein, 18 aa, synthetic construct
KTINGRGSPHSKAQNQVL

SEQ ID NO: 4385 - protein, 18 aa, synthetic construct
KTINGRGSPHSKAQSPTT

SEQ ID NO: 4386 - protein, 18 aa, synthetic construct
KTINGRGSPHSKATSFQT

SEQ ID NO: 4387 - protein, 18 aa, synthetic construct
KTINGSGSPHFVVQNQQT

SEQ ID NO: 4388 - protein, 18 aa, synthetic construct
KTINGSGSPHKRGQKQQT

SEQ ID NO: 4389 - protein, 18 aa, synthetic construct
KTINGSGSPHKRGQNQET

SEQ ID NO: 4390 - protein, 18 aa, synthetic construct
KTINGSGSPHKRGQNQLT

SEQ ID NO: 4391 - protein, 18 aa, synthetic construct
KTINGSGSPHKRGRNQQT

SEQ ID NO: 4392 - protein, 18 aa, synthetic construct
KTINGSGSPHKSGGNQQT

SEQ ID NO: 4393 - protein, 18 aa, synthetic construct
KTINGSGSPHKSGHNQET

SEQ ID NO: 4394 - protein, 18 aa, synthetic construct
KTINGSGSPHKSGHNQLT

SEQ ID NO: 4395 - protein, 18 aa, synthetic construct
KTINGSGSPHKSGHNQQN

SEQ ID NO: 4396 - protein, 18 aa, synthetic construct
KTINGSGSPHKSGLNQLT

SEQ ID NO: 4397 - protein, 18 aa, synthetic construct
KTINGSGSPHKSGPNQQT

SEQ ID NO: 4398 - protein, 18 aa, synthetic construct
KTINGSGSPHKSGQGQQT

SEQ ID NO: 4399 - protein, 18 aa, synthetic construct
KTINGSGSPHKSGQHLQT

SEQ ID NO: 4400 - protein, 18 aa, synthetic construct
KTINGSGSPHKSGQHQQT

SEQ ID NO: 4401 - protein, 18 aa, synthetic construct
KTINGSGSPHKSGQKHQT

SEQ ID NO: 4402 - protein, 18 aa, synthetic construct
KTINGSGSPHKSGQKQQS

SEQ ID NO: 4403 - protein, 18 aa, synthetic construct
KTINGSGSPHKSGQNEQT

SEQ ID NO: 4404 - protein, 18 aa, synthetic construct
KTINGSGSPHKSGQNHQT

SEQ ID NO: 4405 - protein, 18 aa, synthetic construct
KTINGSGSPHKSGQNKQT

SEQ ID NO: 4406 - protein, 18 aa, synthetic construct
KTINGSGSPHKSGQNKTS

SEQ ID NO: 4407 - protein, 18 aa, synthetic construct
KTINGSGSPHKSGQNQEA

SEQ ID NO: 4408 - protein, 18 aa, synthetic construct
KTINGSGSPHKSGQNQET

SEQ ID NO: 4409 - protein, 18 aa, synthetic construct
KTINGSGSPHKSGQNQKT

SEQ ID NO: 4410 - protein, 18 aa, synthetic construct
KTINGSGSPHKSGQNQQI

SEQ ID NO: 4411 - protein, 18 aa, synthetic construct
KTINGSGSPHKSGQNQQR

SEQ ID NO: 4412 - protein, 18 aa, synthetic construct
KTINGSGSPHKSGQNQRT

SEQ ID NO: 4413 - protein, 18 aa, synthetic construct
KTINGSGSPHKSGQNQYT

SEQ ID NO: 4414 - protein, 18 aa, synthetic construct
KTINGSGSPHKSGQRQQT

SEQ ID NO: 4415 - protein, 18 aa, synthetic construct
KTINGSGSPHKSGQSQQT

SEQ ID NO: 4416 - protein, 18 aa, synthetic construct
KTINGSGSPHKSGQYQRT

SEQ ID NO: 4417 - protein, 18 aa, synthetic construct
KTINGSGSPHKSGRNQQA

SEQ ID NO: 4418 - protein, 18 aa, synthetic construct
KTINGSGSPHKSRHNQQT

SEQ ID NO: 4419 - protein, 18 aa, synthetic construct
KTINGSGSPHKSRQYQQT

SEQ ID NO: 4420 - protein, 18 aa, synthetic construct
KTINGSGSPHRKAQAPGT

SEQ ID NO: 4421 - protein, 18 aa, synthetic construct
KTINGSGSPHSKAAMKQT

SEQ ID NO: 4422 - protein, 18 aa, synthetic construct
KTINGSGSPHSKAGRQQT

SEQ ID NO: 4423 - protein, 18 aa, synthetic construct
KTINGSGSPHSKAGRTQT

SEQ ID NO: 4424 - protein, 18 aa, synthetic construct
KTINGSGSPHSKAKSNQT

SEQ ID NO: 4425 - protein, 18 aa, synthetic construct
KTINGSGSPHSKALKTQT

SEQ ID NO: 4426 - protein, 18 aa, synthetic construct
KTINGSGSPHSKAPRTQT

SEQ ID NO: 4427 - protein, 18 aa, synthetic construct
KTINGSGSPHSKAQAART

SEQ ID NO: 4428 - protein, 18 aa, synthetic construct
KTINGSGSPHSKAQAILT

SEQ ID NO: 4429 - protein, 18 aa, synthetic construct
KTINGSGSPHSKAQCRGT

SEQ ID NO: 4430 - protein, 18 aa, synthetic construct
KTINGSGSPHSKAQGLRT

SEQ ID NO: 4431 - protein, 18 aa, synthetic construct
KTINGSGSPHSKAQKGVL

SEQ ID NO: 4432 - protein, 18 aa, synthetic construct
KTINGSGSPHSKAQKSNT

SEQ ID NO: 4433 - protein, 18 aa, synthetic construct
KTINGSGSPHSKAQNNKF

SEQ ID NO: 4434 - protein, 18 aa, synthetic construct
KTINGSGSPHSKAQNRRT

SEQ ID NO: 4435 - protein, 18 aa, synthetic construct
KTINGSGSPHSKAQPKQT

SEQ ID NO: 4436 - protein, 18 aa, synthetic construct
KTINGSGSPHSKAQRAPT

SEQ ID NO: 4437 - protein, 18 aa, synthetic construct
KTINGSGSPHSKAQREHT

SEQ ID NO: 4438 - protein, 18 aa, synthetic construct
KTINGSGSPHSKAQRFGT

SEQ ID NO: 4439 - protein, 18 aa, synthetic construct
KTINGSGSPHSKAQRPCT

SEQ ID NO: 4440 - protein, 18 aa, synthetic construct
KTINGSGSPHSKAQRQAT

SEQ ID NO: 4441 - protein, 18 aa, synthetic construct
KTINGSGSPHSKAQRQPT

SEQ ID NO: 4442 - protein, 18 aa, synthetic construct
KTINGSGSPHSKAQTKLT

SEQ ID NO: 4443 - protein, 18 aa, synthetic construct
KTINGSGSPHSKAQTTHT

SEQ ID NO: 4444 - protein, 18 aa, synthetic construct
KTINGSGSPHSKAQVQRT

SEQ ID NO: 4445 - protein, 18 aa, synthetic construct
KTINGSGSPHSKAQVVRT

SEQ ID NO: 4446 - protein, 18 aa, synthetic construct
KTINGSGSPHSKAQWPNT

SEQ ID NO: 4447 - protein, 18 aa, synthetic construct
KTINGSGSPHSKAQYPST

SEQ ID NO: 4448 - protein, 18 aa, synthetic construct
KTINGSGSPHSKARALQT

SEQ ID NO: 4449 - protein, 18 aa, synthetic construct
KTINGSGSPHSKARDQHT

SEQ ID NO: 4450 - protein, 18 aa, synthetic construct
KTINGSGSPHSKARFQQT

SEQ ID NO: 4451 - protein, 18 aa, synthetic construct
KTINGSGSPHSKARRTQT

SEQ ID NO: 4452 - protein, 18 aa, synthetic construct
KTINGSGSPHSKARSLQT

SEQ ID NO: 4453 - protein, 18 aa, synthetic construct
KTINGSGSPHSKARVIQT

SEQ ID NO: 4454 - protein, 18 aa, synthetic construct
KTINGSGSPHSKAWYLQT

SEQ ID NO: 4455 - protein, 18 aa, synthetic construct
KTINGSGSPHSKGGGQQT

SEQ ID NO: 4456 - protein, 18 aa, synthetic construct
KTINGSGSPHSKGSRQQT

SEQ ID NO: 4457 - protein, 18 aa, synthetic construct
KTINGSGSPHSKLQRQQT

SEQ ID NO: 4458 - protein, 18 aa, synthetic construct
KTINGSGSPHSKMLRQQT

SEQ ID NO: 4459 - protein, 18 aa, synthetic construct
KTINGSGSPHSKSSIKQT

SEQ ID NO: 4460 - protein, 18 aa, synthetic construct
KTINGSGSPHSKVRFQQT

SEQ ID NO: 4461 - protein, 18 aa, synthetic construct
KTINGSGSPHSVVWNQQT

SEQ ID NO: 4462 - protein, 18 aa, synthetic construct
KTINGSTSPHKLAQNQQP

SEQ ID NO: 4463 - protein, 18 aa, synthetic construct
KTINRHDSPHKSGQRPST

SEQ ID NO: 4464 - protein, 18 aa, synthetic construct
KTINRIMSPHSKAQNQQT

SEQ ID NO: 4465 - protein, 18 aa, synthetic construct
KTINTARSPHSKAQNQQT

SEQ ID NO: 4466 - protein, 18 aa, synthetic construct
KTISGHDSPHSKAQNQQT

SEQ ID NO: 4467 - protein, 18 aa, synthetic construct
KTISGSGSPHKSGQNQQT

SEQ ID NO: 4468 - protein, 18 aa, synthetic construct
KTITGHDSPHKSGQRLGT

SEQ ID NO: 4469 - protein, 18 aa, synthetic construct
KTITGSGSPHKSGQNQQT

SEQ ID NO: 4470 - protein, 18 aa, synthetic construct
KTIYGHDSPHKSGQRLGT

SEQ ID NO: 4471 - protein, 18 aa, synthetic construct
KTLNGHDSPHKSGQNLFL

SEQ ID NO: 4472 - protein, 18 aa, synthetic construct
KTLNGHDSPHKSGQNLSS

SEQ ID NO: 4473 - protein, 18 aa, synthetic construct
KTLSFHDSPHKSGQNQQS

SEQ ID NO: 4474 - protein, 18 aa, synthetic construct
KTSNGSGSPHSKAQNTMT

SEQ ID NO: 4475 - protein, 18 aa, synthetic construct
KTTNGHDSPHSKAQNQQT

SEQ ID NO: 4476 - protein, 18 aa, synthetic construct
KTVNGGGSPHSKAQNQQT

SEQ ID NO: 4477 - protein, 18 aa, synthetic construct
KTVNGHDSPHKSGQNVSL

SEQ ID NO: 4478 - protein, 18 aa, synthetic construct
KTVNGHDSPHKSGQRPST

SEQ ID NO: 4479 - protein, 18 aa, synthetic construct
KTVNGHDSPHKSGQTQQA

SEQ ID NO: 4480 - protein, 18 aa, synthetic construct
KTVNGHESPHSKAQNQQT

SEQ ID NO: 4481 - protein, 18 aa, synthetic construct
KTVNGSGSPHSKAQGLST

SEQ ID NO: 4482 - protein, 18 aa, synthetic construct
KTVNGSGSPHSKAQNVTS

SEQ ID NO: 4483 - protein, 18 aa, synthetic construct
KTVPASGSPHSKAQNQQT

SEQ ID NO: 4484 - protein, 18 aa, synthetic construct
NTINGSGSPHSKAHNQQT

SEQ ID NO: 4485 - protein, 18 aa, synthetic construct
TTINGGGSPHSKAQNQQT

SEQ ID NO: 4486 - protein, 8 aa, synthetic construct
HDSPHSKA

SEQ ID NO: 4487 - protein, 9 aa, synthetic construct
NGSGQNQQT

SEQ ID NO: 4488-4672 - skipped (185 entries)

SEQ ID NO: 4673 - DNA, 23 bp, synthetic construct
  source 1..23: mol_type = other DNA
acaaacaccattgtcacactcca

SEQ ID NO: 4674 - DNA, 71 bp, synthetic construct; identical to SEQ ID NO: 1826
  source 1..71: mol_type = other DNA

SEQ ID NO: 4675 - DNA, 23 bp, synthetic construct
  source 1..23: mol_type = other DNA
tccataaagtaggaaacactaca

SEQ ID NO: 4676 - DNA, 22 bp, synthetic construct
  source 1..22: mol_type = other DNA
agtgaattctaccagtgccata

SEQ ID NO: 4677 - DNA, 24 bp, synthetic construct
  source 1..24: mol_type = other DNA
agtgtgagttctaccattgccaaa

SEQ ID NO: 4678 - DNA, 23 bp, synthetic construct
  source 1..23: mol_type = other DNA
agcaaaaatgtgctagtgccaaa

SEQ ID NO: 4679 - DNA, 22 bp, synthetic construct
  source 1..22: mol_type = other DNA
atacatacttctttacattcca

SEQ ID NO: 4680 - protein, 7 aa, synthetic construct
TLAVPFK

SEQ ID NO: 4681 - protein, 18 aa, synthetic construct
KTINGSGSPHSKAQARKT

SEQ ID NO: 4682 - protein, 18 aa, synthetic construct
KYIVGSGSPHSKAQNQQT

SEQ ID NO: 4683 - protein, 18 aa, synthetic construct
KTINGSGSPHSMYMNQQT

SEQ ID NO: 4684 - protein, 18 aa, synthetic construct
KTINGSGSPHSKAFYRQT

SEQ ID NO: 4685 - protein, 18 aa, synthetic construct
KTINGSGSPHSKLKRQQT

SEQ ID NO: 4686 - protein, 18 aa, synthetic construct
KTINGSGSPHSKRHRQQT

SEQ ID NO: 4687 - protein, 18 aa, synthetic construct
KTINGSGSPHSKAQKCIT

SEQ ID NO: 4688 - protein, 18 aa, synthetic construct
KTINGSGSPHSKWRLQQT

SEQ ID NO: 4689 - protein, 18 aa, synthetic construct
KTINGSGSPHSRCRNQQT

SEQ ID NO: 4690 - protein, 18 aa, synthetic construct
KTINGSGSPHSFTCNQQT

SEQ ID NO: 4691 - protein, 18 aa, synthetic construct
KTINGSGSPHSKFFIQQT

SEQ ID NO: 4692 - protein, 18 aa, synthetic construct
KTINGSGSPHSKAQYSRT

SEQ ID NO: 4693 - protein, 18 aa, synthetic construct
KTINGSGSPHCALQNQQT

SEQ ID NO: 4694 - protein, 13 aa, synthetic construct
  VARIANT 7: note = S, C, F, or V
  VARIANT 8: note = K, L, R, I, E, Y, V, or S
  VARIANT 9: note = A, R, L, G, I, Y, S, F, or W
  VARIANT 10: note = W, Q, R, G, L, V, S, or F
  VARIANT 11: note = N, Y, R, C, K, or L
  VARIANT 12: note = Q, G, K, R, T, L, or Y
  VARIANT 13: note = Q, L, R, or V
GSGSPHXXXXXXX

SEQ ID NO: 4695 - protein, 6 aa, synthetic construct
GSGSPH

SEQ ID NO: 4696 - protein, 11 aa, synthetic construct
  VARIANT 7: note = S, I, F, V, C, Y, W, R, P, L, Q, M, K, or G
  VARIANT 8: note = K, M, R, F, V, C, P, Y, L, W, G, N, S, T, I, or A
  VARIANT 9: note = A, Y, L, R, W, C, T, F, H, I, P, M, K, S, V, G, Q, or N
  VARIANT 10: note = Q, M, F, K, H, R, C, W, P, V, L, G, S, Y, I, A, T, D, N, or E
  VARIANT 11: note = A, N, Y, R, K, L, I, M, Q, S, C, W, F, T, G, V, or P
GSGSPHXXXXX

SEQ ID NO: 4697 - protein, 9 aa, synthetic construct
GSGSPHSKA

SEQ ID NO: 4698 - protein, 9 aa, synthetic construct
GHDSPHKSG

SEQ ID NO: 4699 - protein, 12 aa, synthetic construct
  VARIANT 1: note = T, M, A, C, I, R, L, D, F, V, Q, N, or H
  VARIANT 2: note = I, P, E, N, D, S, A, T, M, or Q
  VARIANT 3: note = N, E, G, Y, W, M, T, I, K, Q, F, S, V, A, or L
  VARIANT 4: note = G, D, R, or E
  VARIANT 5: note = H, Q, N, or D
  VARIANT 6: note = D or R
XXXXXXSPHKSG

SEQ ID NO: 4700 - protein, 4 aa, synthetic construct
SPHS

SEQ ID NO: 4701 - protein, 5 aa, synthetic construct
SPHSK

SEQ ID NO: 4702 - protein, 4 aa, synthetic construct
HDSP

SEQ ID NO: 4703 - protein, 5 aa, synthetic construct
HDSPH

SEQ ID NO: 4704 - protein, 5 aa, synthetic construct
SPHKS

SEQ ID NO: 4705 - protein, 5 aa, synthetic construct
SPHAR

SEQ ID NO: 4706 - protein, 5 aa, synthetic construct
SPHVK

SEQ ID NO: 4707 - protein, 5 aa, synthetic construct
SPHAS

SEQ ID NO: 4708 - protein, 5 aa, synthetic construct
SPHKK

SEQ ID NO: 4709 - protein, 5 aa, synthetic construct
SPHVR

SEQ ID NO: 4710 - protein, 5 aa, synthetic construct
SPHRK

SEQ ID NO: 4711 - protein, 5 aa, synthetic construct
SPHKT

SEQ ID NO: 4712 - protein, 5 aa, synthetic construct
SPHKF

SEQ ID NO: 4713 - protein, 5 aa, synthetic construct
SPHKI

SEQ ID NO: 4714 - protein, 5 aa, synthetic construct
SPHKL

SEQ ID NO: 4715 - protein, 5 aa, synthetic construct
SPHKY

SEQ ID NO: 4716 - protein, 5 aa, synthetic construct
SPHTR

SEQ ID NO: 4717 - protein, 5 aa, synthetic construct
SPHKR

SEQ ID NO: 4718 - protein, 5 aa, synthetic construct
SPHGA

SEQ ID NO: 4719 - protein, 5 aa, synthetic construct
SPHSR

SEQ ID NO: 4720 - protein, 5 aa, synthetic construct
SPHSL

SEQ ID NO: 4721 - protein, 5 aa, synthetic construct
SPHSS

SEQ ID NO: 4722 - protein, 5 aa, synthetic construct
SPHFL

SEQ ID NO: 4723 - protein, 5 aa, synthetic construct
SPHWK

SEQ ID NO: 4724 - protein, 5 aa, synthetic construct
SPHGK

SEQ ID NO: 4725 - protein, 5 aa, synthetic construct
SPHTK

SEQ ID NO: 4726 - protein, 5 aa, synthetic construct
SPHNK

SEQ ID NO: 4727 - protein, 5 aa, synthetic construct
SPHAK

SEQ ID NO: 4728 - protein, 5 aa, synthetic construct
SPHKH

SEQ ID NO: 4729 - protein, 5 aa, synthetic construct
SPHKM

SEQ ID NO: 4730 - protein, 5 aa, synthetic construct
SPHRS

SEQ ID NO: 4731 - protein, 6 aa, synthetic construct
SPHSKT

SEQ ID NO: 4732 - protein, 6 aa, synthetic construct
SPHSKG

SEQ ID NO: 4733 - protein, 6 aa, synthetic construct
SPHGKA

SEQ ID NO: 4734 - protein, 6 aa, synthetic construct
SPHNKA

SEQ ID NO: 4735 - protein, 6 aa, synthetic construct
SPHSKN

SEQ ID NO: 4736 - protein, 6 aa, synthetic construct
SPHAKA

SEQ ID NO: 4737 - protein, 6 aa, synthetic construct
SPHSKV

SEQ ID NO: 4738 - protein, 6 aa, synthetic construct
SPHKTG

SEQ ID NO: 4739 - protein, 6 aa, synthetic construct
SPHTKA

SEQ ID NO: 4740 - protein, 6 aa, synthetic construct
SPHKSL

SEQ ID NO: 4741 - protein, 6 aa, synthetic construct
SPHKSE

SEQ ID NO: 4742 - protein, 6 aa, synthetic construct
SPHKSV

SEQ ID NO: 4743 - protein, 6 aa, synthetic construct
SPHKSW

SEQ ID NO: 4744 - protein, 6 aa, synthetic construct
SPHKSN

SEQ ID NO: 4745 - protein, 6 aa, synthetic construct
SPHKHG

SEQ ID NO: 4746 - protein, 6 aa, synthetic construct
SPHKSQ

SEQ ID NO: 4747 - protein, 6 aa, synthetic construct
SPHKSK

SEQ ID NO: 4748 - protein, 6 aa, synthetic construct
SPHKLW

SEQ ID NO: 4749 - protein, 6 aa, synthetic construct
SPHWKG

SEQ ID NO: 4750 - protein, 6 aa, synthetic construct
SPHKMG

SEQ ID NO: 4751 - protein, 6 aa, synthetic construct
SPHKMA

SEQ ID NO: 4752 - protein, 5 aa, synthetic construct
SGSPH

SEQ ID NO: 4753 - protein, 5 aa, synthetic construct
QDSPH

SEQ ID NO: 4754 - protein, 5 aa, synthetic construct
RGSPH

SEQ ID NO: 4755 - protein, 5 aa, synthetic construct
SHSPH

SEQ ID NO: 4756 - protein, 5 aa, synthetic construct
QSSPH

SEQ ID NO: 4757 - protein, 5 aa, synthetic construct
DDSPH

SEQ ID NO: 4758 - protein, 5 aa, synthetic construct
HESPH

SEQ ID NO: 4759 - protein, 5 aa, synthetic construct
NYSPH

SEQ ID NO: 4760 - protein, 5 aa, synthetic construct
VGSPH

SEQ ID NO: 4761 - protein, 5 aa, synthetic construct
SCSPH

SEQ ID NO: 4762 - protein, 5 aa, synthetic construct
LLSPH

SEQ ID NO: 4763 - protein, 5 aa, synthetic construct
NGSPH

SEQ ID NO: 4764 - protein, 5 aa, synthetic construct
PGSPH

SEQ ID NO: 4765 - protein, 5 aa, synthetic construct
GGSPH

SEQ ID NO: 4766 - protein, 5 aa, synthetic construct
TGSPH

SEQ ID NO: 4767 - protein, 5 aa, synthetic construct
SVSPH

SEQ ID NO: 4768 - protein, 5 aa, synthetic construct
IGSPH

SEQ ID NO: 4769 - protein, 5 aa, synthetic construct
DGSPH

SEQ ID NO: 4770 - protein, 5 aa, synthetic construct
LGSPH

SEQ ID NO: 4771 - protein, 5 aa, synthetic construct
AGSPH

SEQ ID NO: 4772 - protein, 5 aa, synthetic construct
EGSPH

SEQ ID NO: 4773 - protein, 5 aa, synthetic construct
SASPH

SEQ ID NO: 4774 - protein, 5 aa, synthetic construct
YDSPH

SEQ ID NO: 4775 - protein, 5 aa, synthetic construct
HGSPH

SEQ ID NO: 4776 - protein, 5 aa, synthetic construct
RDSPH

SEQ ID NO: 4777 - protein, 5 aa, synthetic construct
NDSPH

SEQ ID NO: 4778 - protein, 5 aa, synthetic construct
PDSPH

SEQ ID NO: 4779 - protein, 5 aa, synthetic construct
MGSPH

SEQ ID NO: 4780 - protein, 5 aa, synthetic construct
QVSPH

SEQ ID NO: 4781 - protein, 5 aa, synthetic construct
HNSPH

SEQ ID NO: 4782 - protein, 5 aa, synthetic construct
HPSPH

SEQ ID NO: 4783 - protein, 5 aa, synthetic construct
HSSPH

SEQ ID NO: 4784 - protein, 6 aa, synthetic construct
GHDSPH

SEQ ID NO: 4785 - protein, 6 aa, synthetic construct
GQDSPH

SEQ ID NO: 4786 - protein, 6 aa, synthetic construct
VSGSPH

SEQ ID NO: 4787 - protein, 6 aa, synthetic construct
CSGSPH

SEQ ID NO: 4788 - protein, 6 aa, synthetic construct
GRGSPH

SEQ ID NO: 4789 - protein, 6 aa, synthetic construct
CSHSPH

SEQ ID NO: 4790 - protein, 6 aa, synthetic construct
GQSSPH

SEQ ID NO: 4791 - protein, 6 aa, synthetic construct
GSHSPH

SEQ ID NO: 4792 - protein, 6 aa, synthetic construct
GDDSPH

SEQ ID NO: 4793 - protein, 6 aa, synthetic construct
GHESPH

SEQ ID NO: 4794 - protein, 6 aa, synthetic construct
GNYSPH

SEQ ID NO: 4795 - protein, 6 aa, synthetic construct
RVGSPH

SEQ ID NO: 4796 - protein, 6 aa, synthetic construct
GSCSPH

SEQ ID NO: 4797 - protein, 6 aa, synthetic construct
GLLSPH

SEQ ID NO: 4798 - protein, 6 aa, synthetic construct
MSGSPH

SEQ ID NO: 4799 - protein, 6 aa, synthetic construct
RNGSPH

SEQ ID NO: 4800 - protein, 6 aa, synthetic construct
TSGSPH

SEQ ID NO: 4801 - protein, 6 aa, synthetic construct
ISGSPH

SEQ ID NO: 4802 - protein, 6 aa, synthetic construct
GPGSPH

SEQ ID NO: 4803 - protein, 6 aa, synthetic construct
ESGSPH

SEQ ID NO: 4804 - protein, 6 aa, synthetic construct
SSGSPH

SEQ ID NO: 4805 - protein, 6 aa, synthetic construct
GNGSPH

SEQ ID NO: 4806 - protein, 6 aa, synthetic construct
ASGSPH

SEQ ID NO: 4807 - protein, 6 aa, synthetic construct
NSGSPH

SEQ ID NO: 4808 - protein, 6 aa, synthetic construct
LSGSPH

SEQ ID NO: 4809 - protein, 6 aa, synthetic construct
GGGSPH

SEQ ID NO: 4810 - protein, 6 aa, synthetic construct
KSGSPH

SEQ ID NO: 4811 - protein, 6 aa, synthetic construct
HSGSPH

SEQ ID NO: 4812 - protein, 6 aa, synthetic construct
GTGSPH

SEQ ID NO: 4813 - protein, 6 aa, synthetic construct
PSGSPH

SEQ ID NO: 4814 - protein, 6 aa, synthetic construct
GSVSPH

SEQ ID NO: 4815 - protein, 6 aa, synthetic construct
RSGSPH

SEQ ID NO: 4816 - protein, 6 aa, synthetic construct
GIGSPH

SEQ ID NO: 4817 - protein, 6 aa, synthetic construct
WSGSPH

SEQ ID NO: 4818 - protein, 6 aa, synthetic construct
DSGSPH

SEQ ID NO: 4819 - protein, 6 aa, synthetic construct
IDGSPH

SEQ ID NO: 4820 - protein, 6 aa, synthetic construct
GLGSPH

SEQ ID NO: 4821 - protein, 6 aa, synthetic construct
DAGSPH

SEQ ID NO: 4822 - protein, 6 aa, synthetic construct
DGGSPH

SEQ ID NO: 4823 - protein, 6 aa, synthetic construct
MEGSPH

SEQ ID NO: 4824 - protein, 6 aa, synthetic construct
ENGSPH

SEQ ID NO: 4825 - protein, 6 aa, synthetic construct
GSASPH

SEQ ID NO: 4826 - protein, 6 aa, synthetic construct
KNGSPH

SEQ ID NO: 4827 - protein, 6 aa, synthetic construct
KEGSPH

SEQ ID NO: 4828 - protein, 6 aa, synthetic construct
AIGSPH

SEQ ID NO: 4829 - protein, 6 aa, synthetic construct
GYDSPH

SEQ ID NO: 4830 - protein, 6 aa, synthetic construct
GHGSPH

SEQ ID NO: 4831 - protein, 6 aa, synthetic construct
GRDSPH

SEQ ID NO: 4832 - protein, 6 aa, synthetic construct
GNDSPH

SEQ ID NO: 4833 - protein, 6 aa, synthetic construct
GPDSPH

SEQ ID NO: 4834 - protein, 6 aa, synthetic construct
GMGSPH

SEQ ID NO: 4835 - protein, 6 aa, synthetic construct
GQVSPH

SEQ ID NO: 4836 - protein, 6 aa, synthetic construct
GHNSPH

SEQ ID NO: 4837 - protein, 6 aa, synthetic construct
GHPSPH

SEQ ID NO: 4838 - protein, 6 aa, synthetic construct
GHSSPH

SEQ ID NO: 4839 - protein, 7 aa, synthetic construct
SGSPHSK

SEQ ID NO: 4840 - protein, 7 aa, synthetic construct
HDSPHKS

SEQ ID NO: 4841 - protein, 7 aa, synthetic construct
SGSPHAR

SEQ ID NO: 4842 - protein, 7 aa, synthetic construct
SGSPHVK

SEQ ID NO: 4843 - protein, 7 aa, synthetic construct
QDSPHKS

SEQ ID NO: 4844 - protein, 7 aa, synthetic construct
SGSPHKK

SEQ ID NO: 4845 - protein, 7 aa, synthetic construct
SGSPHVR

SEQ ID NO: 4846 - protein, 7 aa, synthetic construct
SGSPHAS

SEQ ID NO: 4847 - protein, 7 aa, synthetic construct
SGSPHRK

SEQ ID NO: 4848 - protein, 7 aa, synthetic construct
SGSPHKT

SEQ ID NO: 4849 - protein, 7 aa, synthetic construct
SHSPHKS

SEQ ID NO: 4850 - protein, 7 aa, synthetic construct
QSSPHRS

SEQ ID NO: 4851 - protein, 7 aa, synthetic construct
RGSPHAS

SEQ ID NO: 4852 - protein, 7 aa, synthetic construct
RGSPHSK

SEQ ID NO: 4853 - protein, 7 aa, synthetic construct
SGSPHKF

SEQ ID NO: 4854 - protein, 7 aa, synthetic construct
SGSPHKI

SEQ ID NO: 4855 - protein, 7 aa, synthetic construct
SGSPHKL

SEQ ID NO: 4856 - protein, 7 aa, synthetic construct
SGSPHKY

SEQ ID NO: 4857 - protein, 7 aa, synthetic construct
SGSPHTR

SEQ ID NO: 4858 - protein, 7 aa, synthetic construct
SHSPHKR

SEQ ID NO: 4859 - protein, 7 aa, synthetic construct
SGSPHGA

SEQ ID NO: 4860 - protein, 7 aa, synthetic construct
HDSPHKR

SEQ ID NO: 4861 - protein, 7 aa, synthetic construct
DDSPHKS

SEQ ID NO: 4862 - protein, 7 aa, synthetic construct
HESPHKS

SEQ ID NO: 4863 - protein, 7 aa, synthetic construct
NYSPHKI

SEQ ID NO: 4864 - protein, 7 aa, synthetic construct
SGSPHSR

SEQ ID NO: 4865 - protein, 7 aa, synthetic construct
SGSPHSL

SEQ ID NO: 4866 - protein, 7 aa, synthetic construct
SGSPHSS

SEQ ID NO: 4867 - protein, 7 aa, synthetic construct
VGSPHSK

SEQ ID NO: 4868 - protein, 7 aa, synthetic construct
SCSPHRK

SEQ ID NO: 4869 - protein, 7 aa, synthetic construct
SGSPHFL

SEQ ID NO: 4870 - protein, 7 aa, synthetic construct
LLSPHWK

SEQ ID NO: 4871 - protein, 7 aa, synthetic construct
NGSPHSK

SEQ ID NO: 4872 - protein, 7 aa, synthetic construct
PGSPHSK

SEQ ID NO: 4873 - protein, 7 aa, synthetic construct
GGSPHSK

SEQ ID NO: 4874 - protein, 7 aa, synthetic construct
TGSPHSK

SEQ ID NO: 4875 - protein, 7 aa, synthetic construct
SVSPHGK

SEQ ID NO: 4876 - protein, 7 aa, synthetic construct
SGSPHTK

SEQ ID NO: 4877 - protein, 7 aa, synthetic construct
IGSPHSK

SEQ ID NO: 4878 - protein, 7 aa, synthetic construct
DGSPHSK

SEQ ID NO: 4879 - protein, 7 aa, synthetic construct
SGSPHNK

SEQ ID NO: 4880 - protein, 7 aa, synthetic construct
LGSPHSK

SEQ ID NO: 4881 - protein, 7 aa, synthetic construct
AGSPHSK

SEQ ID NO: 4882 - protein, 7 aa, synthetic construct
EGSPHSK

SEQ ID NO: 4883 - protein, 7 aa, synthetic construct
SASPHSK

SEQ ID NO: 4884 - protein, 7 aa, synthetic construct
SGSPHAK

SEQ ID NO: 4885 - protein, 7 aa, synthetic construct
HDSPHKI

SEQ ID NO: 4886 - protein, 7 aa, synthetic construct
YDSPHKS

SEQ ID NO: 4887 - protein, 7 aa, synthetic construct
HDSPHKT

SEQ ID NO: 4888 - protein, 7 aa, synthetic construct
RGSPHKR

SEQ ID NO: 4889 - protein, 7 aa, synthetic construct
HGSPHSK

SEQ ID NO: 4890 - protein, 7 aa, synthetic construct
RDSPHKS

SEQ ID NO: 4891 - protein, 7 aa, synthetic construct
NDSPHKS

SEQ ID NO: 4892 - protein, 7 aa, synthetic construct
QDSPHKI

SEQ ID NO: 4893 - protein, 7 aa, synthetic construct
PDSPHKI

SEQ ID NO: 4894 - protein, 7 aa, synthetic construct
PDSPHKS

SEQ ID NO: 4895 - protein, 7 aa, synthetic construct
MGSPHSK

SEQ ID NO: 4896 - protein, 7 aa, synthetic construct
HDSPHKH

SEQ ID NO: 4897 - protein, 7 aa, synthetic construct
QVSPHKS

SEQ ID NO: 4898 - protein, 7 aa, synthetic construct
HNSPHKS

SEQ ID NO: 4899 - protein, 7 aa, synthetic construct
NGSPHKR

SEQ ID NO: 4900 - protein, 7 aa, synthetic construct
HDSPHKY

SEQ ID NO: 4901 - protein, 7 aa, synthetic construct
NDSPHKI

SEQ ID NO: 4902 - protein, 7 aa, synthetic construct
HDSPHKL

SEQ ID NO: 4903 - protein, 7 aa, synthetic construct
HPSPHWK

SEQ ID NO: 4904 - protein, 7 aa, synthetic construct
HDSPHKM

SEQ ID NO: 4905 - protein, 7 aa, synthetic construct
HSSPHRS

SEQ ID NO: 4906 - protein, 9 aa, synthetic construct
GSGSPHARM

SEQ ID NO: 4907 - protein, 9 aa, synthetic construct
GSGSPHVKS

SEQ ID NO: 4908 - protein, 9 aa, synthetic construct
GQDSPHKSG

SEQ ID NO: 4909 - protein, 9 aa, synthetic construct
GSGSPHASR

SEQ ID NO: 4910 - protein, 9 aa, synthetic construct
GSGSPHVKI

SEQ ID NO: 4911 - protein, 9 aa, synthetic construct
GSGSPHKKN

SEQ ID NO: 4912 - protein, 9 aa, synthetic construct
GSGSPHVRM

SEQ ID NO: 4913 - protein, 9 aa, synthetic construct
VSGSPHSKA

SEQ ID NO: 4914 - protein, 9 aa, synthetic construct
CSGSPHSKA

SEQ ID NO: 4915 - protein, 9 aa, synthetic construct
GSGSPHRKA

SEQ ID NO: 4916 - protein, 9 aa, synthetic construct
CSGSPHKTS

SEQ ID NO: 4917 - protein, 9 aa, synthetic construct
CSHSPHKSG

SEQ ID NO: 4918 - protein, 9 aa, synthetic construct
GQSSPHRSG

SEQ ID NO: 4919 - protein, 9 aa, synthetic construct
GRGSPHASR

SEQ ID NO: 4920 - protein, 9 aa, synthetic construct
GRGSPHSKA

SEQ ID NO: 4921 - protein, 9 aa, synthetic construct
GSGSPHKFG

SEQ ID NO: 4922 - protein, 9 aa, synthetic construct
GSGSPHKIG

SEQ ID NO: 4923 - protein, 9 aa, synthetic construct
GSGSPHKLG

SEQ ID NO: 4924 - protein, 9 aa, synthetic construct
GSGSPHKTS

SEQ ID NO: 4925 - protein, 9 aa, synthetic construct
GSGSPHKTT

SEQ ID NO: 4926 - protein, 9 aa, synthetic construct
GSGSPHKTY

SEQ ID NO: 4927 - protein, 9 aa, synthetic construct
GSGSPHKYG

SEQ ID NO: 4928 - protein, 9 aa, synthetic construct
GSGSPHSKD

SEQ ID NO: 4929 - protein, 9 aa, synthetic construct
GSGSPHSKP

SEQ ID NO: 4930 - protein, 9 aa, synthetic construct
GSGSPHTRG

SEQ ID NO: 4931 - protein, 9 aa, synthetic construct
GSGSPHVRG

SEQ ID NO: 4932 - protein, 9 aa, synthetic construct
GSHSPHKRG

SEQ ID NO: 4933 - protein, 9 aa, synthetic construct
GSHSPHKSG

SEQ ID NO: 4934 - protein, 9 aa, synthetic construct
VSGSPHASR

SEQ ID NO: 4935 - protein, 9 aa, synthetic construct
VSGSPHGAR

SEQ ID NO: 4936 - protein, 9 aa, synthetic construct
VSGSPHKFG

SEQ ID NO: 4937 - protein, 9 aa, synthetic construct
GHDSPHKRG

SEQ ID NO: 4938 - protein, 9 aa, synthetic construct
GDDSPHKSG

SEQ ID NO: 4939 - protein, 9 aa, synthetic construct
GHESPHKSA

SEQ ID NO: 4940 - protein, 9 aa, synthetic construct
GHDSPHKSA

SEQ ID NO: 4941 - protein, 9 aa, synthetic construct
GNYSPHKIG

SEQ ID NO: 4942 - protein, 9 aa, synthetic construct
GHDSPHKSR

SEQ ID NO: 4943 - protein, 9 aa, synthetic construct
GSGSPHSKL

SEQ ID NO: 4944 - protein, 9 aa, synthetic construct
GSGSPHSRA

SEQ ID NO: 4945 - protein, 9 aa, synthetic construct
GSGSPHSKR

SEQ ID NO: 4946 - protein, 9 aa, synthetic construct
GSGSPHSLR

SEQ ID NO: 4947 - protein, 9 aa, synthetic construct
GSGSPHSRG

SEQ ID NO: 4948 - protein, 9 aa, synthetic construct
GSGSPHSSR

SEQ ID NO: 4949 - protein, 9 aa, synthetic construct
RVGSPHSKA

SEQ ID NO: 4950 - protein, 9 aa, synthetic construct
GSCSPHRKA

SEQ ID NO: 4951 - protein, 9 aa, synthetic construct
GSGSPHFLR

SEQ ID NO: 4952 - protein, 9 aa, synthetic construct
GSGSPHSKW

SEQ ID NO: 4953 - protein, 9 aa, synthetic construct
GSGSPHSKS

SEQ ID NO: 4954 - protein, 9 aa, synthetic construct
GLLSPHWKA

SEQ ID NO: 4955 - protein, 9 aa, synthetic construct
GSGSPHVRR

SEQ ID NO: 4956 - protein, 9 aa, synthetic construct
GSGSPHSKV

SEQ ID NO: 4957 - protein, 9 aa, synthetic construct
MSGSPHSKA

SEQ ID NO: 4958 - protein, 9 aa, synthetic construct
RNGSPHSKA

SEQ ID NO: 4959 - protein, 9 aa, synthetic construct
TSGSPHSKA

SEQ ID NO: 4960 - protein, 9 aa, synthetic construct
ISGSPHSKA

SEQ ID NO: 4961 - protein, 9 aa, synthetic construct
GPGSPHSKA

SEQ ID NO: 4962 - protein, 9 aa, synthetic construct
GSGSPHSKT

SEQ ID NO: 4963 - protein, 9 aa, synthetic construct
ESGSPHSKA

SEQ ID NO: 4964 - protein, 9 aa, synthetic construct
SSGSPHSKA

SEQ ID NO: 4965 - protein, 9 aa, synthetic construct
GNGSPHSKA

SEQ ID NO: 4966 - protein, 9 aa, synthetic construct
ASGSPHSKA

SEQ ID NO: 4967 - protein, 9 aa, synthetic construct
NSGSPHSKA

SEQ ID NO: 4968 - protein, 9 aa, synthetic construct
LSGSPHSKA

SEQ ID NO: 4969 - protein, 9 aa, synthetic construct
GGGSPHSKA

SEQ ID NO: 4970 - protein, 9 aa, synthetic construct
KSGSPHSKA

SEQ ID NO: 4971 - protein, 9 aa, synthetic construct
GGGSPHSKS

SEQ ID NO: 4972 - protein, 9 aa, synthetic construct
GSGSPHSKG

SEQ ID NO: 4973 - protein, 9 aa, synthetic construct
HSGSPHSKA

SEQ ID NO: 4974 - protein, 9 aa, synthetic construct
GTGSPHSKA

SEQ ID NO: 4975 - protein, 9 aa, synthetic construct
PSGSPHSKA

SEQ ID NO: 4976 - protein, 9 aa, synthetic construct
GSVSPHGKA

SEQ ID NO: 4977 - protein, 9 aa, synthetic construct
RSGSPHSKA

SEQ ID NO: 4978 - protein, 9 aa, synthetic construct
GSGSPHTKA

SEQ ID NO: 4979 - protein, 9 aa, synthetic construct
GIGSPHSKA

SEQ ID NO: 4980 - protein, 9 aa, synthetic construct
WSGSPHSKA

SEQ ID NO: 4981 - protein, 9 aa, synthetic construct
DSGSPHSKA

SEQ ID NO: 4982 - protein, 9 aa, synthetic construct
IDGSPHSKA

SEQ ID NO: 4983 - protein, 9 aa, synthetic construct
GSGSPHNKA

SEQ ID NO: 4984 - protein, 9 aa, synthetic construct
GLGSPHSKS

SEQ ID NO: 4985 - protein, 9 aa, synthetic construct
DAGSPHSKA

SEQ ID NO: 4986 - protein, 9 aa, synthetic construct
DGGSPHSKA

SEQ ID NO: 4987 - protein, 9 aa, synthetic construct
MEGSPHSKA

SEQ ID NO: 4988 - protein, 9 aa, synthetic construct
ENGSPHSKA

SEQ ID NO: 4989 - protein, 9 aa, synthetic construct
GSASPHSKA

SEQ ID NO: 4990 - protein, 9 aa, synthetic construct
GNGSPHSKS

SEQ ID NO: 4991 - protein, 9 aa, synthetic construct
KNGSPHSKA

SEQ ID NO: 4992 - protein, 9 aa, synthetic construct
KEGSPHSKA

SEQ ID NO: 4993 - protein, 9 aa, synthetic construct
AIGSPHSKA

SEQ ID NO: 4994 - protein, 9 aa, synthetic construct
GSGSPHSKN

SEQ ID NO: 4995 - protein, 9 aa, synthetic construct
GSGSPHAKA

SEQ ID NO: 4996 - protein, 9 aa, synthetic construct
GHDSPHKIG

SEQ ID NO: 4997 - protein, 9 aa, synthetic construct
GYDSPHKSG

SEQ ID NO: 4998 - protein, 9 aa, synthetic construct
GHESPHKSG

SEQ ID NO: 4999 - protein, 9 aa, synthetic construct
GHDSPHKTG

SEQ ID NO: 5000 - protein, 9 aa, synthetic construct
GRGSPHKRG

SEQ ID NO: 5001 - protein, 9 aa, synthetic construct
GHDSPHKSL

SEQ ID NO: 5002 - protein, 9 aa, synthetic construct
GHGSPHSKA

SEQ ID NO: 5003 - protein, 9 aa, synthetic construct
GHDSPHKSE

SEQ ID NO: 5004 - protein, 9 aa, synthetic construct
GRDSPHKSG

SEQ ID NO: 5005 - protein, 9 aa, synthetic construct
GNDSPHKSV

SEQ ID NO: 5006 - protein, 9 aa, synthetic construct
GQDSPHKIG

SEQ ID NO: 5007 - protein, 9 aa, synthetic construct
GHDSPHKSV

SEQ ID NO: 5008 - protein, 9 aa, synthetic construct
GPDSPHKIG

SEQ ID NO: 5009 - protein, 9 aa, synthetic construct
GPDSPHKSG

SEQ ID NO: 5010 - protein, 9 aa, synthetic construct
GHDSPHKSW

SEQ ID NO: 5011 - protein, 9 aa, synthetic construct
GHDSPHKSN

SEQ ID NO: 5012 - protein, 9 aa, synthetic construct
GMGSPHSKT

SEQ ID NO: 5013 - protein, 9 aa, synthetic construct
GHDSPHKHG

SEQ ID NO: 5014 - protein, 9 aa, synthetic construct
GQVSPHKSG

SEQ ID NO: 5015 - protein, 9 aa, synthetic construct
GDDSPHKSV

SEQ ID NO: 5016 - protein, 9 aa, synthetic construct
GHNSPHKSG

SEQ ID NO: 5017 - protein, 9 aa, synthetic construct
GNGSPHKRG

SEQ ID NO: 5018 - protein, 9 aa, synthetic construct
GHDSPHKYG

SEQ ID NO: 5019 - protein, 9 aa, synthetic construct
GHDSPHKSQ

SEQ ID NO: 5020 - protein, 9 aa, synthetic construct
GNDSPHKIG

SEQ ID NO: 5021 - protein, 9 aa, synthetic construct
GHDSPHKSK

SEQ ID NO: 5022 - protein, 9 aa, synthetic construct
GHDSPHKLW

SEQ ID NO: 5023 - protein, 9 aa, synthetic construct
GHPSPHWKG

SEQ ID NO: 5024 - protein, 9 aa, synthetic construct
GHDSPHKMG

SEQ ID NO: 5025 - protein, 9 aa, synthetic construct
GHDSPHKMA

SEQ ID NO: 5026 - protein, 9 aa, synthetic construct
GHSSPHRSG

SEQ ID NO: 5027 - protein, 8 aa, synthetic construct
SGSPHKYG

SEQ ID NO: 5028 - protein, 4 aa, synthetic construct
QNQQ

SEQ ID NO: 5029 - protein, 4 aa, synthetic construct
WNQQ

SEQ ID NO: 5030 - protein, 4 aa, synthetic construct
QYYV

SEQ ID NO: 5031 - protein, 4 aa, synthetic construct
RRQQ

SEQ ID NO: 5032 - protein, 4 aa, synthetic construct
GCGQ

SEQ ID NO: 5033 - protein, 4 aa, synthetic construct
LRQQ

SEQ ID NO: 5034 - protein, 4 aa, synthetic construct
RNQQ

SEQ ID NO: 5035 - protein, 4 aa, synthetic construct
VNQQ

SEQ ID NO: 5036 - protein, 4 aa, synthetic construct
FRLQ

SEQ ID NO: 5037 - protein, 4 aa, synthetic construct
FNQQ

SEQ ID NO: 5038 - protein, 4 aa, synthetic construct
LLQQ

SEQ ID NO: 5039 - protein, 4 aa, synthetic construct
SNQQ

SEQ ID NO: 5040 - protein, 4 aa, synthetic construct
RLQQ

SEQ ID NO: 5041 - protein, 4 aa, synthetic construct
LNQQ

SEQ ID NO: 5042 - protein, 4 aa, synthetic construct
QRKL

SEQ ID NO: 5043 - protein, 4 aa, synthetic construct
LRRQ

SEQ ID NO: 5044 - protein, 4 aa, synthetic construct
QRLR

SEQ ID NO: 5045 - protein, 4 aa, synthetic construct
QRRL

SEQ ID NO: 5046 - protein, 4 aa, synthetic construct
RRLQ

SEQ ID NO: 5047 - protein, 4 aa, synthetic construct
RLRQ

SEQ ID NO: 5048 - protein, 4 aa, synthetic construct
SKRQ

SEQ ID NO: 5049 - protein, 4 aa, synthetic construct
QLYR

SEQ ID NO: 5050 - protein, 4 aa, synthetic construct
QLTV

SEQ ID NO: 5051 - protein, 4 aa, synthetic construct
QNKQ

SEQ ID NO: 5052 - protein, 4 aa, synthetic construct
KNQQ

SEQ ID NO: 5053 - protein, 4 aa, synthetic construct
QKQQ

SEQ ID NO: 5054 - protein, 4 aa, synthetic construct
QTQQ

SEQ ID NO: 5055 - protein, 4 aa, synthetic construct
QNHQ

SEQ ID NO: 5056 - protein, 4 aa, synthetic construct
QHQQ

SEQ ID NO: 5057 - protein, 4 aa, synthetic construct
QNQH

SEQ ID NO: 5058 - protein, 4 aa, synthetic construct
QHRQ

SEQ ID NO: 5059 - protein, 4 aa, synthetic construct
LTQQ

SEQ ID NO: 5060 - protein, 4 aa, synthetic construct
QNQW

SEQ ID NO: 5061 - protein, 4 aa, synthetic construct
QNTH

SEQ ID NO: 5062 - protein, 4 aa, synthetic construct
RRRQ

SEQ ID NO: 5063 - protein, 4 aa, synthetic construct
QYQQ

SEQ ID NO: 5064 - protein, 4 aa, synthetic construct
QNDQ

SEQ ID NO: 5065 - protein, 4 aa, synthetic construct
QNRH

SEQ ID NO: 5066 - protein, 4 aa, synthetic construct
RDQQ

SEQ ID NO: 5067 - protein, 4 aa, synthetic construct
PNLQ

SEQ ID NO: 5068 - protein, 4 aa, synthetic construct
HVRQ

SEQ ID NO: 5069 - protein, 4 aa, synthetic construct
PNQH

SEQ ID NO: 5070 - protein, 4 aa, synthetic construct
HNQQ

SEQ ID NO: 5071 - protein, 4 aa, synthetic construct
QSQQ

SEQ ID NO: 5072 - protein, 4 aa, synthetic construct
QPAK

SEQ ID NO: 5073 - protein, 4 aa, synthetic construct
QNLA

SEQ ID NO: 5074 - protein, 4 aa, synthetic construct
QNQL

SEQ ID NO: 5075 - protein, 4 aa, synthetic construct
QGQQ

SEQ ID NO: 5076 - protein, 4 aa, synthetic construct
LNRQ

SEQ ID NO: 5077 - protein, 4 aa, synthetic construct
QNPP

SEQ ID NO: 5078 - protein, 4 aa, synthetic construct
QNLQ

SEQ ID NO: 5079 - protein, 4 aa, synthetic construct
QDQE

SEQ ID NO: 5080 - protein, 4 aa, synthetic construct
QDQQ

SEQ ID NO: 5081 - protein, 4 aa, synthetic construct
HWQQ

SEQ ID NO: 5082 - protein, 4 aa, synthetic construct
PNQQ

SEQ ID NO: 5083 - protein, 4 aa, synthetic construct
PEQQ

SEQ ID NO: 5084 - protein, 4 aa, synthetic construct
QRTM

SEQ ID NO: 5085 - protein, 4 aa, synthetic construct
LHQH

SEQ ID NO: 5086 - protein, 4 aa, synthetic construct
QHRI

SEQ ID NO: 5087 - protein, 4 aa, synthetic construct
QYIH

SEQ ID NO: 5088 - protein, 4 aa, synthetic construct
QKFE

SEQ ID NO: 5089 - protein, 4 aa, synthetic construct
QFPS

SEQ ID NO: 5090 - protein, 4 aa, synthetic construct
QNPL

SEQ ID NO: 5091 - protein, 4 aa, synthetic construct
QAIK

SEQ ID NO: 5092 - protein, 4 aa, synthetic construct
QNRQ

SEQ ID NO: 5093 - protein, 4 aa, synthetic construct
QYQH

SEQ ID NO: 5094 - protein, 4 aa, synthetic construct
QNPQ

SEQ ID NO: 5095 - protein, 4 aa, synthetic construct
QHQL

SEQ ID NO: 5096 - protein, 4 aa, synthetic construct
QSPP

SEQ ID NO: 5097 - protein, 4 aa, synthetic construct
QAKL

SEQ ID NO: 5098 - protein, 4 aa, synthetic construct
KSQQ

SEQ ID NO: 5099 - protein, 4 aa, synthetic construct
QDRP

SEQ ID NO: 5100 - protein, 4 aa, synthetic construct
QNLG

SEQ ID NO: 5101 - protein, 4 aa, synthetic construct
QAFH

SEQ ID NO: 5102 - protein, 4 aa, synthetic construct
QNAQ

SEQ ID NO: 5103 - protein, 4 aa, synthetic construct
HNQL

SEQ ID NO: 5104 - protein, 4 aa, synthetic construct
QKLN

SEQ ID NO: 5105 - protein, 4 aa, synthetic construct
QNVQ

SEQ ID NO: 5106 - protein, 4 aa, synthetic construct
QAQQ

SEQ ID NO: 5107 - protein, 4 aa, synthetic construct
QTPP

SEQ ID NO: 5108 - protein, 4 aa, synthetic construct
QPPA

SEQ ID NO: 5109 - protein, 4 aa, synthetic construct
QERP

SEQ ID NO: 5110 - protein, 4 aa, synthetic construct
QDLQ

SEQ ID NO: 5111 - protein, 4 aa, synthetic construct
QAMH

SEQ ID NO: 5112 - protein, 4 aa, synthetic construct
QHPS

SEQ ID NO: 5113 - protein, 4 aa, synthetic construct
PGLQ

SEQ ID NO: 5114 - protein, 4 aa, synthetic construct
QGIR

SEQ ID NO: 5115 - protein, 4 aa, synthetic construct
QAPA

SEQ ID NO: 5116 - protein, 4 aa, synthetic construct
QIPP

SEQ ID NO: 5117 - protein, 4 aa, synthetic construct
QTQL

SEQ ID NO: 5118 - protein, 4 aa, synthetic construct
QAPS

SEQ ID NO: 5119 - protein, 4 aa, synthetic construct
QNTY

SEQ ID NO: 5120 - protein, 4 aa, synthetic construct
QDKQ

SEQ ID NO: 5121 - protein, 4 aa, synthetic construct
QNHL

SEQ ID NO: 5122 - protein, 4 aa, synthetic construct
QIGM

SEQ ID NO: 5123 - protein, 4 aa, synthetic construct
LNKQ

SEQ ID NO: 5124 - protein, 4 aa, synthetic construct
PNQL

SEQ ID NO: 5125 - protein, 4 aa, synthetic construct
QLQQ

SEQ ID NO: 5126 - protein, 4 aa, synthetic construct
QRMS

SEQ ID NO: 5127 - protein, 4 aa, synthetic construct
QGIL

SEQ ID NO: 5128 - protein, 4 aa, synthetic construct
QDRQ

SEQ ID NO: 5129 - protein, 4 aa, synthetic construct
RDWQ

SEQ ID NO: 5130 - protein, 4 aa, synthetic construct
QERS

SEQ ID NO: 5131 - protein, 4 aa, synthetic construct
QNYQ

SEQ ID NO: 5132 - protein, 4 aa, synthetic construct
QRTC

SEQ ID NO: 5133 - protein, 4 aa, synthetic construct
QIGH

SEQ ID NO: 5134 - protein, 4 aa, synthetic construct
QGAI

SEQ ID NO: 5135 - protein, 4 aa, synthetic construct
QVPP

SEQ ID NO: 5136 - protein, 4 aa, synthetic construct
QVQQ

SEQ ID NO: 5137 - protein, 4 aa, synthetic construct
LMRQ

SEQ ID NO: 5138 - protein, 4 aa, synthetic construct
QYSV

SEQ ID NO: 5139 - protein, 4 aa, synthetic construct
QAIT

SEQ ID NO: 5140 - protein, 4 aa, synthetic construct
QKTL

SEQ ID NO: 5141 - protein, 4 aa, synthetic construct
QLHH

SEQ ID NO: 5142 - protein, 4 aa, synthetic construct
QNII

SEQ ID NO: 5143 - protein, 4 aa, synthetic construct
QGHH

SEQ ID NO: 5144 - protein, 4 aa, synthetic construct
QSKV

SEQ ID NO: 5145 - protein, 4 aa, synthetic construct
QLPS

SEQ ID NO: 5146 - protein, 4 aa, synthetic construct
IGKQ

SEQ ID NO: 5147 - protein, 4 aa, synthetic construct
QAIH

SEQ ID NO: 5148 - protein, 4 aa, synthetic construct
QHGL

SEQ ID NO: 5149 - protein, 4 aa, synthetic construct
QFMC

SEQ ID NO: 5150 - protein, 4 aa, synthetic construct
QNQM

SEQ ID NO: 5151 - protein, 4 aa, synthetic construct
QHLQ

SEQ ID NO: 5152 - protein, 4 aa, synthetic construct
QPAR

SEQ ID NO: 5153 - protein, 4 aa, synthetic construct
QSLQ

SEQ ID NO: 5154 - protein, 4 aa, synthetic construct
QSQL

SEQ ID NO: 5155 - protein, 4 aa, synthetic construct
HSQQ

SEQ ID NO: 5156 - protein, 4 aa, synthetic construct
QMPS

SEQ ID NO: 5157 - protein, 4 aa, synthetic construct
QGSL

SEQ ID NO: 5158 - protein, 4 aa, synthetic construct
QVPA

SEQ ID NO: 5159 - protein, 4 aa, synthetic construct
HYQQ

SEQ ID NO: 5160 - protein, 4 aa, synthetic construct
QVPS

SEQ ID NO: 5161 - protein, 4 aa, synthetic construct
RGEQ

SEQ ID NO: 5162 - protein, 4 aa, synthetic construct
PGQQ

SEQ ID NO: 5163 - protein, 4 aa, synthetic construct
LEQQ

SEQ ID NO: 5164 - protein, 4 aa, synthetic construct
QNQS

SEQ ID NO: 5165 - protein, 4 aa, synthetic construct
QKVI

SEQ ID NO: 5166 - protein, 4 aa, synthetic construct
QNND

SEQ ID NO: 5167 - protein, 4 aa, synthetic construct
QSVH

SEQ ID NO: 5168 - protein, 4 aa, synthetic construct
QPLG

SEQ ID NO: 5169 - protein, 4 aa, synthetic construct
HNQE

SEQ ID NO: 5170 - protein, 4 aa, synthetic construct
QIQQ

SEQ ID NO: 5171 - protein, 4 aa, synthetic construct
QVRN

SEQ ID NO: 5172 - protein, 4 aa, synthetic construct
PSNQ

SEQ ID NO: 5173 - protein, 4 aa, synthetic construct
QVGH

SEQ ID NO: 5174 - protein, 4 aa, synthetic construct
QRDI

SEQ ID NO: 5175 - protein, 4 aa, synthetic construct
QMPN

SEQ ID NO: 5176 - protein, 4 aa, synthetic construct
RGLQ

SEQ ID NO: 5177 - protein, 4 aa, synthetic construct
PSLQ

SEQ ID NO: 5178 - protein, 4 aa, synthetic construct
QRDQ

SEQ ID NO: 5179 - protein, 4 aa, synthetic construct
QAKG

SEQ ID NO: 5180 - protein, 4 aa, synthetic construct
QSAH

SEQ ID NO: 5181 - protein, 4 aa, synthetic construct
QSTM

SEQ ID NO: 5182 - protein, 4 aa, synthetic construct
QREM

SEQ ID NO: 5183 - protein, 4 aa, synthetic construct
QYRA

SEQ ID NO: 5184 - protein, 4 aa, synthetic construct
QRQQ

SEQ ID NO: 5185 - protein, 4 aa, synthetic construct
QWQQ

SEQ ID NO: 5186 - protein, 4 aa, synthetic construct
QRMN

SEQ ID NO: 5187 - protein, 4 aa, synthetic construct
GDSQ

SEQ ID NO: 5188 - protein, 4 aa, synthetic construct
QKIS

SEQ ID NO: 5189 - protein, 4 aa, synthetic construct
PSMQ

SEQ ID NO: 5190 - protein, 4 aa, synthetic construct
SPRQ

SEQ ID NO: 5191 - protein, 4 aa, synthetic construct
MEQQ

SEQ ID NO: 5192 - protein, 4 aa, synthetic construct
QYQN

SEQ ID NO: 5193 - protein, 4 aa, synthetic construct
QIRQ

SEQ ID NO: 5194 - protein, 4 aa, synthetic construct
QSVQ

SEQ ID NO: 5195 - protein, 4 aa, synthetic construct
RSQQ

SEQ ID NO: 5196 - protein, 4 aa, synthetic construct
QNKL

SEQ ID NO: 5197 - protein, 4 aa, synthetic construct
QIQH

SEQ ID NO: 5198 - protein, 4 aa, synthetic construct
PRQQ

SEQ ID NO: 5199 - protein, 4 aa, synthetic construct
HTQQ

SEQ ID NO: 5200 - protein, 4 aa, synthetic construct
QRQH

SEQ ID NO: 5201 - protein, 4 aa, synthetic construct
RNQE

SEQ ID NO: 5202 - protein, 4 aa, synthetic construct
QSKQ

SEQ ID NO: 5203 - protein, 4 aa, synthetic construct
QNQP

SEQ ID NO: 5204 - protein, 4 aa, synthetic construct
QSPQ

SEQ ID NO: 5205 - protein, 4 aa, synthetic construct
QTRQ

SEQ ID NO: 5206 - protein, 4 aa, synthetic construct
QNLH

SEQ ID NO: 5207 - protein, 4 aa, synthetic construct
QNQE

SEQ ID NO: 5208 - protein, 4 aa, synthetic construct
LNQP

SEQ ID NO: 5209 - protein, 4 aa, synthetic construct
QNQD

SEQ ID NO: 5210 - protein, 4 aa, synthetic construct
QNLL

SEQ ID NO: 5211 - protein, 4 aa, synthetic construct
QLVI

SEQ ID NO: 5212 - protein, 4 aa, synthetic construct
RTQE

SEQ ID NO: 5213 - protein, 4 aa, synthetic construct
QTHQ

SEQ ID NO: 5214 - protein, 4 aa, synthetic construct
QDQH

SEQ ID NO: 5215 - protein, 4 aa, synthetic construct
QSQH

SEQ ID NO: 5216 - protein, 4 aa, synthetic construct
VRQQ

SEQ ID NO: 5217 - protein, 4 aa, synthetic construct
AWQQ

SEQ ID NO: 5218 - protein, 4 aa, synthetic construct
QSVP

SEQ ID NO: 5219 - protein, 4 aa, synthetic construct
QNIQ

SEQ ID NO: 5220 - protein, 4 aa, synthetic construct
LDQQ

SEQ ID NO: 5221 - protein, 4 aa, synthetic construct
PDQQ

SEQ ID NO: 5222 - protein, 4 aa, synthetic construct
ESQQ

SEQ ID NO: 5223 - protein, 4 aa, synthetic construct
QRQL

SEQ ID NO: 5224 - protein, 4 aa, synthetic construct
QIIV

SEQ ID NO: 5225 - protein, 4 aa, synthetic construct
QKQS

SEQ ID NO: 5226 - protein, 4 aa, synthetic construct
QSHQ

SEQ ID NO: 5227 - protein, 4 aa, synthetic construct
QFVV

SEQ ID NO: 5228 - protein, 4 aa, synthetic construct
QSQP

SEQ ID NO: 5229 - protein, 4 aa, synthetic construct
QNEQ

SEQ ID NO: 5230 - protein, 4 aa, synthetic construct
INQQ

SEQ ID NO: 5231 - protein, 4 aa, synthetic construct
RNRQ

SEQ ID NO: 5232 - protein, 4 aa, synthetic construct
RDQK

SEQ ID NO: 5233 - protein, 4 aa, synthetic construct
QWKR

SEQ ID NO: 5234 - protein, 4 aa, synthetic construct
ENRQ

SEQ ID NO: 5235 - protein, 4 aa, synthetic construct
QTQP

SEQ ID NO: 5236 - protein, 4 aa, synthetic construct
QKQL

SEQ ID NO: 5237 - protein, 4 aa, synthetic construct
RNQL

SEQ ID NO: 5238 - protein, 4 aa, synthetic construct
ISIQ

SEQ ID NO: 5239 - protein, 4 aa, synthetic construct
QTVC

SEQ ID NO: 5240 - protein, 4 aa, synthetic construct
QQIM

SEQ ID NO: 5241 - protein, 4 aa, synthetic construct
LNHQ

SEQ ID NO: 5242 - protein, 4 aa, synthetic construct
QNQA

SEQ ID NO: 5243 - protein, 4 aa, synthetic construct
QMIH

SEQ ID NO: 5244 - protein, 4 aa, synthetic construct
RNHQ

SEQ ID NO: 5245 - protein, 4 aa, synthetic construct
QKMN

SEQ ID NO: 5246 - protein, 17 aa, synthetic construct
TINGSGSPHKYGQNQQT

SEQ ID NO: 5247 - protein, 7 aa, synthetic construct
SLLWNQQ

SEQ ID NO: 5248 - protein, 7 aa, synthetic construct
SKAQYYV

SEQ ID NO: 5249 - protein, 7 aa, synthetic construct
SKLRRQQ

SEQ ID NO: 5250 - protein, 7 aa, synthetic construct
SIWQNQQ

SEQ ID NO: 5251 - protein, 7 aa, synthetic construct
SKAGCGQ

SEQ ID NO: 5252 - protein, 7 aa, synthetic construct
SRAQNQQ

SEQ ID NO: 5253 - protein, 7 aa, synthetic construct
SKRLRQQ

SEQ ID NO: 5254 - protein, 7 aa, synthetic construct
SLRRNQQ

SEQ ID NO: 5255 - protein, 7 aa, synthetic construct
SRGRNQQ

SEQ ID NO: 5256 - protein, 7 aa, synthetic construct
SEIVNQQ

SEQ ID NO: 5257 - protein, 7 aa, synthetic construct
SSRRNQQ

SEQ ID NO: 5258 - protein, 7 aa, synthetic construct
CLLQNQQ

SEQ ID NO: 5259 - protein, 7 aa, synthetic construct
SKAFRLQ

SEQ ID NO: 5260 - protein, 7 aa, synthetic construct
CLAQNQQ

SEQ ID NO: 5261 - protein, 7 aa, synthetic construct
FLRQNQQ

SEQ ID NO: 5262 - protein, 7 aa, synthetic construct
SLRFNQQ

SEQ ID NO: 5263 - protein, 7 aa, synthetic construct
SYLRNQQ

SEQ ID NO: 5264 - protein, 7 aa, synthetic construct
CSLQNQQ

SEQ ID NO: 5265 - protein, 7 aa, synthetic construct
VLWQNQQ

SEQ ID NO: 5266 - protein, 7 aa, synthetic construct
SKWLLQQ

SEQ ID NO: 5267 - protein, 7 aa, synthetic construct
SLWSNQQ

SEQ ID NO: 5268 - protein, 7 aa, synthetic construct
SKRRLQQ

SEQ ID NO: 5269 - protein, 7 aa, synthetic construct
SVYLNQQ

SEQ ID NO: 5270 - protein, 7 aa, synthetic construct
SLWLNQQ

SEQ ID NO: 5271 - protein, 7 aa, synthetic construct
SKAQRKL

SEQ ID NO: 5272 - protein, 7 aa, synthetic construct
SKALRRQ

SEQ ID NO: 5273 - protein, 7 aa, synthetic construct
SKAQRLR

SEQ ID NO: 5274 - protein, 7 aa, synthetic construct
SKAQNQQ

SEQ ID NO: 5275 - protein, 7 aa, synthetic construct
SKAQRRL

SEQ ID NO: 5276 - protein, 7 aa, synthetic construct
SKARRQQ

SEQ ID NO: 5277 - protein, 7 aa, synthetic construct
SKARRLQ

SEQ ID NO: 5278 - protein, 7 aa, synthetic construct
SKSRRQQ

SEQ ID NO: 5279 - protein, 7 aa, synthetic construct
SKARLRQ

SEQ ID NO: 5280 - protein, 7 aa, synthetic construct
SKASKRQ

SEQ ID NO: 5281 - protein, 7 aa, synthetic construct
VRRQNQQ

SEQ ID NO: 5282 - protein, 7 aa, synthetic construct
SKAQLYR

SEQ ID NO: 5283 - protein, 7 aa, synthetic construct
SLFRNQQ

SEQ ID NO: 5284 - protein, 7 aa, synthetic construct
SKAQLTV

SEQ ID NO: 5285 - protein, 13 aa, synthetic construct
GSGSPHSLLWNQQ

SEQ ID NO: 5286 - protein, 13 aa, synthetic construct
GSGSPHSIWQNQQ

SEQ ID NO: 5287 - protein, 13 aa, synthetic construct
GSGSPHSEIVNQQ

SEQ ID NO: 5288 - protein, 13 aa, synthetic construct
GSGSPHCLLQNQQ

SEQ ID NO: 5289 - protein, 13 aa, synthetic construct
GSGSPHCLAQNQQ

SEQ ID NO: 5290 - protein, 13 aa, synthetic construct
GSGSPHSYLRNQQ

SEQ ID NO: 5291 - protein, 13 aa, synthetic construct
GSGSPHCSLQNQQ

SEQ ID NO: 5292 - protein, 13 aa, synthetic construct
GSGSPHVLWQNQQ

SEQ ID NO: 5293 - protein, 13 aa, synthetic construct
GSGSPHSLWSNQQ

SEQ ID NO: 5294 - protein, 13 aa, synthetic construct
GSGSPHSVYLNQQ

SEQ ID NO: 5295 - protein, 13 aa, synthetic construct
GSGSPHSLWLNQQ

SEQ ID NO: 5296 - protein, 13 aa, synthetic construct
GSGSPHSLFRNQQ

SEQ ID NO: 5297 - protein, 6 aa, synthetic construct
TINGHD

SEQ ID NO: 5298 - protein, 6 aa, synthetic construct
MPEGHD

SEQ ID NO: 5299 - protein, 6 aa, synthetic construct
MEGGHD

SEQ ID NO: 5300 - protein, 6 aa, synthetic construct
MEYGHD

SEQ ID NO: 5301 - protein, 6 aa, synthetic construct
AEWGHD

SEQ ID NO: 5302 - protein, 6 aa, synthetic construct
CEWGHD

SEQ ID NO: 5303 - protein, 6 aa, synthetic construct
ANNGQD

SEQ ID NO: 5304 - protein, 6 aa, synthetic construct
IPEGHD

SEQ ID NO: 5305 - protein, 6 aa, synthetic construct
ADMGHD

SEQ ID NO: 5306 - protein, 6 aa, synthetic construct
IEYGHD

SEQ ID NO: 5307 - protein, 6 aa, synthetic construct
ADYGHD

SEQ ID NO: 5308 - protein, 6 aa, synthetic construct
IETGHD

SEQ ID NO: 5309 - protein, 6 aa, synthetic construct
MEWGHD

SEQ ID NO: 5310 - protein, 6 aa, synthetic construct
CEYGHD

SEQ ID NO: 5311 - protein, 6 aa, synthetic construct
RINGHD

SEQ ID NO: 5312 - protein, 6 aa, synthetic construct
MEIGHD

SEQ ID NO: 5313 - protein, 6 aa, synthetic construct
LEYGHD

SEQ ID NO: 5314 - protein, 6 aa, synthetic construct
ADWGHD

SEQ ID NO: 5315 - protein, 6 aa, synthetic construct
IEIGHD

SEQ ID NO: 5316 - protein, 6 aa, synthetic construct
TIKDND

SEQ ID NO: 5317 - protein, 6 aa, synthetic construct
DIMGHD

SEQ ID NO: 5318 - protein, 6 aa, synthetic construct
FEQGHD

SEQ ID NO: 5319 - protein, 6 aa, synthetic construct
MEFGHD

SEQ ID NO: 5320 - protein, 6 aa, synthetic construct
CDQGHD

SEQ ID NO: 5321 - protein, 6 aa, synthetic construct
LPEGHD

SEQ ID NO: 5322 - protein, 6 aa, synthetic construct
IENGHD

SEQ ID NO: 5323 - protein, 6 aa, synthetic construct
MESGHD

SEQ ID NO: 5324 - protein, 6 aa, synthetic construct
AEIGHD

SEQ ID NO: 5325 - protein, 6 aa, synthetic construct
VEYGHD

SEQ ID NO: 5326 - protein, 6 aa, synthetic construct
TSNGDD

SEQ ID NO: 5327 - protein, 6 aa, synthetic construct
IEVGHD

SEQ ID NO: 5328 - protein, 6 aa, synthetic construct
MEMGHD

SEQ ID NO: 5329 - protein, 6 aa, synthetic construct
AEVGHD

SEQ ID NO: 5330 - protein, 6 aa, synthetic construct
MDAGHD

SEQ ID NO: 5331 - protein, 6 aa, synthetic construct
VEWGHD

SEQ ID NO: 5332 - protein, 6 aa, synthetic construct
AEQGHD

SEQ ID NO: 5333 - protein, 6 aa, synthetic construct
LEWGHD

SEQ ID NO: 5334 - protein, 6 aa, synthetic construct
MELGHD

SEQ ID NO: 5335 - protein, 6 aa, synthetic construct
METGHD

SEQ ID NO: 5336 - protein, 6 aa, synthetic construct
MEAGHD

SEQ ID NO: 5337 - protein, 6 aa, synthetic construct
TINRQR

SEQ ID NO: 5338 - protein, 6 aa, synthetic construct
IESGHD

SEQ ID NO: 5339 - protein, 6 aa, synthetic construct
TAKDHD

SEQ ID NO: 5340 - protein, 6 aa, synthetic construct
MEVGHD

SEQ ID NO: 5341 - protein, 6 aa, synthetic construct
CEIGHD

SEQ ID NO: 5342 - protein, 6 aa, synthetic construct
ATNGHD

SEQ ID NO: 5343 - protein, 6 aa, synthetic construct
MDGGHD

SEQ ID NO: 5344 - protein, 6 aa, synthetic construct
QEVGHD

SEQ ID NO: 5345 - protein, 6 aa, synthetic construct
ADQGHD

SEQ ID NO: 5346 - protein, 6 aa, synthetic construct
NMNGHD

SEQ ID NO: 5347 - protein, 6 aa, synthetic construct
TPWEHD

SEQ ID NO: 5348 - protein, 6 aa, synthetic construct
IEMGHD

SEQ ID NO: 5349 - protein, 6 aa, synthetic construct
TANEHD

SEQ ID NO: 5350 - protein, 6 aa, synthetic construct
QQQGHD

SEQ ID NO: 5351 - protein, 6 aa, synthetic construct
TPQDHD

SEQ ID NO: 5352 - protein, 6 aa, synthetic construct
HDWGHD

SEQ ID NO: 5353 - protein, 6 aa, synthetic construct
IEGGHD

SEQ ID NO: 5354 - protein, 11 aa, synthetic construct
TINGHDSPHKR

SEQ ID NO: 5355 - protein, 11 aa, synthetic construct
MPEGHDSPHKS

SEQ ID NO: 5356 - protein, 11 aa, synthetic construct
MEGGHDSPHKS

SEQ ID NO: 5357 - protein, 11 aa, synthetic construct
MEYGHDSPHKS

SEQ ID NO: 5358 - protein, 11 aa, synthetic construct
AEWGHDSPHKS

SEQ ID NO: 5359 - protein, 11 aa, synthetic construct
CEWGHDSPHKS

SEQ ID NO: 5360 - protein, 11 aa, synthetic construct
ANNGQDSPHKS

SEQ ID NO: 5361 - protein, 11 aa, synthetic construct
IPEGHDSPHKS

SEQ ID NO: 5362 - protein, 11 aa, synthetic construct
ADMGHDSPHKS

SEQ ID NO: 5363 - protein, 11 aa, synthetic construct
IEYGHDSPHKS

SEQ ID NO: 5364 - protein, 11 aa, synthetic construct
ADYGHDSPHKS

SEQ ID NO: 5365 - protein, 11 aa, synthetic construct
IETGHDSPHKS

SEQ ID NO: 5366 - protein, 11 aa, synthetic construct
MEWGHDSPHKS

SEQ ID NO: 5367 - protein, 11 aa, synthetic construct
CEYGHDSPHKS

SEQ ID NO: 5368 - protein, 11 aa, synthetic construct
RINGHDSPHKS

SEQ ID NO: 5369 - protein, 11 aa, synthetic construct
MEIGHDSPHKS

SEQ ID NO: 5370 - protein, 11 aa, synthetic construct
LEYGHDSPHKS

SEQ ID NO: 5371 - protein, 11 aa, synthetic construct
ADWGHDSPHKS

SEQ ID NO: 5372 - protein, 11 aa, synthetic construct
IEIGHDSPHKS

SEQ ID NO: 5373 - protein, 11 aa, synthetic construct
TIKDNDSPHKS

SEQ ID NO: 5374 - protein, 11 aa, synthetic construct
DIMGHDSPHKS

SEQ ID NO: 5375 - protein, 11 aa, synthetic construct
FEQGHDSPHKS

SEQ ID NO: 5376 - protein, 11 aa, synthetic construct
MEFGHDSPHKS

SEQ ID NO: 5377 - protein, 11 aa, synthetic construct
CDQGHDSPHKS

SEQ ID NO: 5378 - protein, 11 aa, synthetic construct
LPEGHDSPHKS

SEQ ID NO: 5379 - protein, 11 aa, synthetic construct
IENGHDSPHKS

SEQ ID NO: 5380 - protein, 11 aa, synthetic construct
MESGHDSPHKS

SEQ ID NO: 5381 - protein, 11 aa, synthetic construct
AEIGHDSPHKS

SEQ ID NO: 5382 - protein, 11 aa, synthetic construct
VEYGHDSPHKS

SEQ ID NO: 5383 - protein, 11 aa, synthetic construct
TSNGDDSPHKS

SEQ ID NO: 5384 - protein, 11 aa, synthetic construct
IEVGHDSPHKS

SEQ ID NO: 5385 - protein, 11 aa, synthetic construct
MEMGHDSPHKS

SEQ ID NO: 5386 - protein, 11 aa, synthetic construct
AEVGHDSPHKS

SEQ ID NO: 5387 - protein, 11 aa, synthetic construct
MDAGHDSPHKS

SEQ ID NO: 5388 - protein, 11 aa, synthetic construct
VEWGHDSPHKS

SEQ ID NO: 5389 - protein, 11 aa, synthetic construct
AEQGHDSPHKS

SEQ ID NO: 5390 - protein, 11 aa, synthetic construct
LEWGHDSPHKS

SEQ ID NO: 5391 - protein, 11 aa, synthetic construct
MELGHDSPHKS

SEQ ID NO: 5392 - protein, 11 aa, synthetic construct
METGHDSPHKS

SEQ ID NO: 5393 - protein, 11 aa, synthetic construct
MEAGHDSPHKS

SEQ ID NO: 5394 - protein, 11 aa, synthetic construct
TINRQRSPHKS

SEQ ID NO: 5395 - protein, 11 aa, synthetic construct
IESGHDSPHKS

SEQ ID NO: 5396 - protein, 11 aa, synthetic construct
TAKDHDSPHKS

SEQ ID NO: 5397 - protein, 11 aa, synthetic construct
MEVGHDSPHKS

SEQ ID NO: 5398 - protein, 11 aa, synthetic construct
CEIGHDSPHKS

SEQ ID NO: 5399 - protein, 11 aa, synthetic construct
ATNGHDSPHKS

SEQ ID NO: 5400 - protein, 11 aa, synthetic construct
MDGGHDSPHKS

SEQ ID NO: 5401 - protein, 11 aa, synthetic construct
QEVGHDSPHKS

SEQ ID NO: 5402 - protein, 11 aa, synthetic construct
ADQGHDSPHKS

SEQ ID NO: 5403 - protein, 11 aa, synthetic construct
NMNGHDSPHKS

SEQ ID NO: 5404 - protein, 11 aa, synthetic construct
TPWEHDSPHKS

SEQ ID NO: 5405 - protein, 11 aa, synthetic construct
IEMGHDSPHKS

SEQ ID NO: 5406 - protein, 11 aa, synthetic construct
TANEHDSPHKS

SEQ ID NO: 5407 - protein, 11 aa, synthetic construct
TINGHDSPHKS

SEQ ID NO: 5408 - protein, 11 aa, synthetic construct
QQQGHDSPHKS

SEQ ID NO: 5409 - protein, 11 aa, synthetic construct
TPQDHDSPHKS

SEQ ID NO: 5410 - protein, 11 aa, synthetic construct
HDWGHDSPHKS

SEQ ID NO: 5411 - protein, 11 aa, synthetic construct
IEGGHDSPHKS

SEQ ID NO: 5412 - protein, 5 aa, synthetic construct
QNQQT

SEQ ID NO: 5413 - protein, 5 aa, synthetic construct
QNRHT

SEQ ID NO: 5414 - protein, 5 aa, synthetic construct
RDQQT

SEQ ID NO: 5415 - protein, 5 aa, synthetic construct
PNLQT

SEQ ID NO: 5416 - protein, 5 aa, synthetic construct
HVRQT

SEQ ID NO: 5417 - protein, 5 aa, synthetic construct
PNQHT

SEQ ID NO: 5418 - protein, 5 aa, synthetic construct
QSQQT

SEQ ID NO: 5419 - protein, 5 aa, synthetic construct
QNQQI

SEQ ID NO: 5420 - protein, 5 aa, synthetic construct
QPAKT

SEQ ID NO: 5421 - protein, 5 aa, synthetic construct
QTQQN

SEQ ID NO: 5422 - protein, 5 aa, synthetic construct
QNLAT

SEQ ID NO: 5423 - protein, 5 aa, synthetic construct
QNQLT

SEQ ID NO: 5424 - protein, 5 aa, synthetic construct
QGQQT

SEQ ID NO: 5425 - protein, 5 aa, synthetic construct
LNRQS

SEQ ID NO: 5426 - protein, 5 aa, synthetic construct
HNQQT

SEQ ID NO: 5427 - protein, 5 aa, synthetic construct
QNPPT

SEQ ID NO: 5428 - protein, 5 aa, synthetic construct
QNLQT

SEQ ID NO: 5429 - protein, 5 aa, synthetic construct
QYQQT

SEQ ID NO: 5430 - protein, 5 aa, synthetic construct
QDQET

SEQ ID NO: 5431 - protein, 5 aa, synthetic construct
QNHQT

SEQ ID NO: 5432 - protein, 5 aa, synthetic construct
QDQQT

SEQ ID NO: 5433 - protein, 5 aa, synthetic construct
HWQQT

SEQ ID NO: 5434 - protein, 5 aa, synthetic construct
PNQQT

SEQ ID NO: 5435 - protein, 5 aa, synthetic construct
QNQLI

SEQ ID NO: 5436 - protein, 5 aa, synthetic construct
PEQQT

SEQ ID NO: 5437 - protein, 5 aa, synthetic construct
QRTMT

SEQ ID NO: 5438 - protein, 5 aa, synthetic construct
QNQQH

SEQ ID NO: 5439 - protein, 5 aa, synthetic construct
LHQHT

SEQ ID NO: 5440 - protein, 5 aa, synthetic construct
QHRIT

SEQ ID NO: 5441 - protein, 5 aa, synthetic construct
QYIHT

SEQ ID NO: 5442 - protein, 5 aa, synthetic construct
QKFET

SEQ ID NO: 5443 - protein, 5 aa, synthetic construct
QFPST

SEQ ID NO: 5444 - protein, 5 aa, synthetic construct
HNQQR

SEQ ID NO: 5445 - protein, 5 aa, synthetic construct
QAIKT

SEQ ID NO: 5446 - protein, 5 aa, synthetic construct
QNRQT

SEQ ID NO: 5447 - protein, 5 aa, synthetic construct
QYQHT

SEQ ID NO: 5448 - protein, 5 aa, synthetic construct
QNPQS

SEQ ID NO: 5449 - protein, 5 aa, synthetic construct
QHQLT

SEQ ID NO: 5450 - protein, 5 aa, synthetic construct
QSPPT

SEQ ID NO: 5451 - protein, 5 aa, synthetic construct
QAKLT

SEQ ID NO: 5452 - protein, 5 aa, synthetic construct
KSQQT

SEQ ID NO: 5453 - protein, 5 aa, synthetic construct
QDRPT

SEQ ID NO: 5454 - protein, 5 aa, synthetic construct
QSQQL

SEQ ID NO: 5455 - protein, 5 aa, synthetic construct
QAFHT

SEQ ID NO: 5456 - protein, 5 aa, synthetic construct
QKQQD

SEQ ID NO: 5457 - protein, 5 aa, synthetic construct
QNAQT

SEQ ID NO: 5458 - protein, 5 aa, synthetic construct
HNQLT

SEQ ID NO: 5459 - protein, 5 aa, synthetic construct
QNQQY

SEQ ID NO: 5460 - protein, 5 aa, synthetic construct
QKLNT

SEQ ID NO: 5461 - protein, 5 aa, synthetic construct
QNVQT

SEQ ID NO: 5462 - protein, 5 aa, synthetic construct
QAQQT

SEQ ID NO: 5463 - protein, 5 aa, synthetic construct
QNLQA

SEQ ID NO: 5464 - protein, 5 aa, synthetic construct
QTPPT

SEQ ID NO: 5465 - protein, 5 aa, synthetic construct
QYQHA

SEQ ID NO: 5466 - protein, 5 aa, synthetic construct
QGQQA

SEQ ID NO: 5467 - protein, 5 aa, synthetic construct
QPPAT

SEQ ID NO: 5468 - protein, 5 aa, synthetic construct
QERPT

SEQ ID NO: 5469 - protein, 5 aa, synthetic construct
QDLQT

SEQ ID NO: 5470 - protein, 5 aa, synthetic construct
QAMHT

SEQ ID NO: 5471 - protein, 5 aa, synthetic construct
LNQQT

SEQ ID NO: 5472 - protein, 5 aa, synthetic construct
QHPST

SEQ ID NO: 5473 - protein, 5 aa, synthetic construct
PGLQT

SEQ ID NO: 5474 - protein, 5 aa, synthetic construct
QGIRT

SEQ ID NO: 5475 - protein, 5 aa, synthetic construct
QAPAT

SEQ ID NO: 5476 - protein, 5 aa, synthetic construct
QSQQI

SEQ ID NO: 5477 - protein, 5 aa, synthetic construct
QIPPT

SEQ ID NO: 5478 - protein, 5 aa, synthetic construct
QTQLT

SEQ ID NO: 5479 - protein, 5 aa, synthetic construct
QAPST

SEQ ID NO: 5480 - protein, 5 aa, synthetic construct
QNTYA

SEQ ID NO: 5481 - protein, 5 aa, synthetic construct
QNQHI

SEQ ID NO: 5482 - protein, 5 aa, synthetic construct
QNHLT

SEQ ID NO: 5483 - protein, 5 aa, synthetic construct
QIGMT

SEQ ID NO: 5484 - protein, 5 aa, synthetic construct
LNKQT

SEQ ID NO: 5485 - protein, 5 aa, synthetic construct
QLQQT

SEQ ID NO: 5486 - protein, 5 aa, synthetic construct
QRMST

SEQ ID NO: 5487 - protein, 5 aa, synthetic construct
QGILT

SEQ ID NO: 5488 - protein, 5 aa, synthetic construct
QDRQT

SEQ ID NO: 5489 - protein, 5 aa, synthetic construct
RDWQT

SEQ ID NO: 5490 - protein, 5 aa, synthetic construct
QNTHD

SEQ ID NO: 5491 - protein, 5 aa, synthetic construct
PNLQI

SEQ ID NO: 5492 - protein, 5 aa, synthetic construct
QERST

SEQ ID NO: 5493 - protein, 5 aa, synthetic construct
QNYQT

SEQ ID NO: 5494 - protein, 5 aa, synthetic construct
QRTCT

SEQ ID NO: 5495 - protein, 5 aa, synthetic construct
QIGHT

SEQ ID NO: 5496 - protein, 5 aa, synthetic construct
QGAIT

SEQ ID NO: 5497 - protein, 5 aa, synthetic construct
QVPPT

SEQ ID NO: 5498 - protein, 5 aa, synthetic construct
QVQQI

SEQ ID NO: 5499 - protein, 5 aa, synthetic construct
LMRQT

SEQ ID NO: 5500 - protein, 5 aa, synthetic construct
QYSVT

SEQ ID NO: 5501 - protein, 5 aa, synthetic construct
QAITT

SEQ ID NO: 5502 - protein, 5 aa, synthetic construct
QKTLT

SEQ ID NO: 5503 - protein, 5 aa, synthetic construct
QNQWT

SEQ ID NO: 5504 - protein, 5 aa, synthetic construct
QLHHT

SEQ ID NO: 5505 - protein, 5 aa, synthetic construct
QNIII

SEQ ID NO: 5506 - protein, 5 aa, synthetic construct
QGHHT

SEQ ID NO: 5507 - protein, 5 aa, synthetic construct
QSKVT

SEQ ID NO: 5508 - protein, 5 aa, synthetic construct
QLPST

SEQ ID NO: 5509 - protein, 5 aa, synthetic construct
IGKQT

SEQ ID NO: 5510 - protein, 5 aa, synthetic construct
QAIHT

SEQ ID NO: 5511 - protein, 5 aa, synthetic construct
QHGLT

SEQ ID NO: 5512 - protein, 5 aa, synthetic construct
QFMCT

SEQ ID NO: 5513 - protein, 5 aa, synthetic construct
QHLQT

SEQ ID NO: 5514 - protein, 5 aa, synthetic construct
QNHQN

SEQ ID NO: 5515 - protein, 5 aa, synthetic construct
QPART

SEQ ID NO: 5516 - protein, 5 aa, synthetic construct
QSLQT

SEQ ID NO: 5517 - protein, 5 aa, synthetic construct
QSQLT

SEQ ID NO: 5518 - protein, 5 aa, synthetic construct
QDRQS

SEQ ID NO: 5519 - protein, 5 aa, synthetic construct
QMPST

SEQ ID NO: 5520 - protein, 5 aa, synthetic construct
QGSLT

SEQ ID NO: 5521 - protein, 5 aa, synthetic construct
QVPAT

SEQ ID NO: 5522 - protein, 5 aa, synthetic construct
QDKQT

SEQ ID NO: 5523 - protein, 5 aa, synthetic construct
HYQQT

SEQ ID NO: 5524 - protein, 5 aa, synthetic construct
QVPST

SEQ ID NO: 5525 - protein, 5 aa, synthetic construct
RGEQT

SEQ ID NO: 5526 - protein, 5 aa, synthetic construct
PGQQT

SEQ ID NO: 5527 - protein, 5 aa, synthetic construct
QSLQI

SEQ ID NO: 5528 - protein, 5 aa, synthetic construct
LEQQT

SEQ ID NO: 5529 - protein, 5 aa, synthetic construct
QNQST

SEQ ID NO: 5530 - protein, 5 aa, synthetic construct
QKVIT

SEQ ID NO: 5531 - protein, 5 aa, synthetic construct
QNNDQ

SEQ ID NO: 5532 - protein, 5 aa, synthetic construct
QSVHT

SEQ ID NO: 5533 - protein, 5 aa, synthetic construct
QPLGT

SEQ ID NO: 5534 - protein, 5 aa, synthetic construct
HNQET

SEQ ID NO: 5535 - protein, 5 aa, synthetic construct
QNLQI

SEQ ID NO: 5536 - protein, 5 aa, synthetic construct
QIQQT

SEQ ID NO: 5537 - protein, 5 aa, synthetic construct
QVRNT

SEQ ID NO: 5538 - protein, 5 aa, synthetic construct
PSNQT

SEQ ID NO: 5539 - protein, 5 aa, synthetic construct
QVGHT

SEQ ID NO: 5540 - protein, 5 aa, synthetic construct
QRDIT

SEQ ID NO: 5541 - protein, 5 aa, synthetic construct
QMPNT

SEQ ID NO: 5542 - protein, 5 aa, synthetic construct
RGLQT

SEQ ID NO: 5543 - protein, 5 aa, synthetic construct
QKQQT

SEQ ID NO: 5544 - protein, 5 aa, synthetic construct
PSLQT

SEQ ID NO: 5545 - protein, 5 aa, synthetic construct
QRDQT

SEQ ID NO: 5546 - protein, 5 aa, synthetic construct
QAKGT

SEQ ID NO: 5547 - protein, 5 aa, synthetic construct
QSAHT

SEQ ID NO: 5548 - protein, 5 aa, synthetic construct
QSTMT

SEQ ID NO: 5549 - protein, 5 aa, synthetic construct
QREMT

SEQ ID NO: 5550 - protein, 5 aa, synthetic construct
QYRAT

SEQ ID NO: 5551 - protein, 5 aa, synthetic construct
QWQQT

SEQ ID NO: 5552 - protein, 5 aa, synthetic construct
QRMNT

SEQ ID NO: 5553 - protein, 5 aa, synthetic construct
GDSQT

SEQ ID NO: 5554 - protein, 5 aa, synthetic construct
QKIST

SEQ ID NO: 5555 - protein, 5 aa, synthetic construct
PSMQT

SEQ ID NO: 5556 - protein, 5 aa, synthetic construct
SPRQT

SEQ ID NO: 5557 - protein, 5 aa, synthetic construct
MEQQT

SEQ ID NO: 5558 - protein, 5 aa, synthetic construct
QYQNT

SEQ ID NO: 5559 - protein, 5 aa, synthetic construct
QHQQT

SEQ ID NO: 5560 - protein, 5 aa, synthetic construct
INQQT

SEQ ID NO: 5561 - protein, 5 aa, synthetic construct
PNQQH

SEQ ID NO: 5562 - protein, 5 aa, synthetic construct
ENRQT

SEQ ID NO: 5563 - protein, 5 aa, synthetic construct
QTQQA

SEQ ID NO: 5564 - protein, 5 aa, synthetic construct
QNQAT

SEQ ID NO: 5565 - protein, 4 aa, synthetic construct
KTII

SEQ ID NO: 5566 - protein, 4 aa, synthetic construct
KTFP

SEQ ID NO: 5567 - protein, 4 aa, synthetic construct
KTEK

SEQ ID NO: 5568 - protein, 4 aa, synthetic construct
KTVN

SEQ ID NO: 5569 - protein, 4 aa, synthetic construct
KTFN

SEQ ID NO: 5570 - protein, 4 aa, synthetic construct
KTIN

SEQ ID NO: 5571 - protein, 4 aa, synthetic construct
TTIN

SEQ ID NO: 5572 - protein, 4 aa, synthetic construct
KSIN

SEQ ID NO: 5573 - protein, 4 aa, synthetic construct
KTER

SEQ ID NO: 5574 - protein, 4 aa, synthetic construct
KELH

SEQ ID NO: 5575 - protein, 4 aa, synthetic construct
KAIN

SEQ ID NO: 5576 - protein, 4 aa, synthetic construct
KTDN

SEQ ID NO: 5577 - protein, 4 aa, synthetic construct
KTFH

SEQ ID NO: 5578 - protein, 4 aa, synthetic construct
KTSN

SEQ ID NO: 5579 - protein, 4 aa, synthetic construct
ETIN

SEQ ID NO: 5580 - protein, 4 aa, synthetic construct
NTIN

SEQ ID NO: 5581 - protein, 4 aa, synthetic construct
KTEN

SEQ ID NO: 5582 - protein, 4 aa, synthetic construct
KTSS

SEQ ID NO: 5583 - protein, 4 aa, synthetic construct
KTCN

SEQ ID NO: 5584 - protein, 4 aa, synthetic construct
KTEH

SEQ ID NO: 5585 - protein, 4 aa, synthetic construct
KAEM

SEQ ID NO: 5586 - protein, 4 aa, synthetic construct
KATN

SEQ ID NO: 5587 - protein, 4 aa, synthetic construct
KAIK

SEQ ID NO: 5588 - protein, 4 aa, synthetic construct
KTDK

SEQ ID NO: 5589 - protein, 4 aa, synthetic construct
KTFK

SEQ ID NO: 5590 - protein, 4 aa, synthetic construct
KSDQ

SEQ ID NO: 5591 - protein, 4 aa, synthetic construct
KTEI

SEQ ID NO: 5592 - protein, 4 aa, synthetic construct
KTID

SEQ ID NO: 5593 - protein, 4 aa, synthetic construct
KNTN

SEQ ID NO: 5594 - protein, 4 aa, synthetic construct
KTET

SEQ ID NO: 5595 - protein, 4 aa, synthetic construct
KTEL

SEQ ID NO: 5596 - protein, 4 aa, synthetic construct
KNIN

SEQ ID NO: 5597 - protein, 4 aa, synthetic construct
KTEA

SEQ ID NO: 5598 - protein, 4 aa, synthetic construct
KTAN

SEQ ID NO: 5599 - protein, 4 aa, synthetic construct
NTIY

SEQ ID NO: 5600 - protein, 4 aa, synthetic construct
KTFS

SEQ ID NO: 5601 - protein, 4 aa, synthetic construct
KTES

SEQ ID NO: 5602 - protein, 4 aa, synthetic construct
KTTN

SEQ ID NO: 5603 - protein, 4 aa, synthetic construct
KTED

SEQ ID NO: 5604 - protein, 4 aa, synthetic construct
KTNN

SEQ ID NO: 5605 - protein, 4 aa, synthetic construct
KEVH

SEQ ID NO: 5606 - protein, 4 aa, synthetic construct
KTIS

SEQ ID NO: 5607 - protein, 4 aa, synthetic construct
KTVR

SEQ ID NO: 5608 - protein, 4 aa, synthetic construct
KTDR

SEQ ID NO: 5609 - protein, 4 aa, synthetic construct
ETIK

SEQ ID NO: 5610 - protein, 4 aa, synthetic construct
KNHI

SEQ ID NO: 5611 - protein, 4 aa, synthetic construct
KESD

SEQ ID NO: 5612 - protein, 4 aa, synthetic construct
KTIK

SEQ ID NO: 5613 - protein, 4 aa, synthetic construct
KTDL

SEQ ID NO: 5614 - protein, 4 aa, synthetic construct
KTVP

SEQ ID NO: 5615 - protein, 4 aa, synthetic construct
KTVI

SEQ ID NO: 5616 - protein, 4 aa, synthetic construct
KAEH

SEQ ID NO: 5617 - protein, 4 aa, synthetic construct
KNCL

SEQ ID NO: 5618 - protein, 4 aa, synthetic construct
KTVK

SEQ ID NO: 5619 - protein, 4 aa, synthetic construct
KNAD

SEQ ID NO: 5620 - protein, 4 aa, synthetic construct
KTIT

SEQ ID NO: 5621 - protein, 4 aa, synthetic construct
KNCV

SEQ ID NO: 5622 - protein, 4 aa, synthetic construct
KNAL

SEQ ID NO: 5623 - protein, 4 aa, synthetic construct
KVIN

SEQ ID NO: 5624 - protein, 4 aa, synthetic construct
KTEF

SEQ ID NO: 5625 - protein, 4 aa, synthetic construct
KTRE

SEQ ID NO: 5626 - protein, 4 aa, synthetic construct
KQGE

SEQ ID NO: 5627 - protein, 4 aa, synthetic construct
KSEK

SEQ ID NO: 5628 - protein, 4 aa, synthetic construct
KNVN

SEQ ID NO: 5629 - protein, 4 aa, synthetic construct
KGGE

SEQ ID NO: 5630 - protein, 4 aa, synthetic construct
KEFV

SEQ ID NO: 5631 - protein, 4 aa, synthetic construct
KSDK

SEQ ID NO: 5632 - protein, 4 aa, synthetic construct
KTEQ

SEQ ID NO: 5633 - protein, 4 aa, synthetic construct
KEVQ

SEQ ID NO: 5634 - protein, 4 aa, synthetic construct
KTEY

SEQ ID NO: 5635 - protein, 4 aa, synthetic construct
KNCW

SEQ ID NO: 5636 - protein, 4 aa, synthetic construct
KTDV

SEQ ID NO: 5637 - protein, 4 aa, synthetic construct
KSDI

SEQ ID NO: 5638 - protein, 4 aa, synthetic construct
KNSI

SEQ ID NO: 5639 - protein, 4 aa, synthetic construct
KNSL

SEQ ID NO: 5640 - protein, 4 aa, synthetic construct
KEVV

SEQ ID NO: 5641 - protein, 4 aa, synthetic construct
KTEP

SEQ ID NO: 5642 - protein, 4 aa, synthetic construct
KSEL

SEQ ID NO: 5643 - protein, 4 aa, synthetic construct
KTWQ

SEQ ID NO: 5644 - protein, 4 aa, synthetic construct
KTEV

SEQ ID NO: 5645 - protein, 4 aa, synthetic construct
KAVN

SEQ ID NO: 5646 - protein, 4 aa, synthetic construct
KGVL

SEQ ID NO: 5647 - protein, 4 aa, synthetic construct
KTEG

SEQ ID NO: 5648 - protein, 4 aa, synthetic construct
KTRD

SEQ ID NO: 5649 - protein, 4 aa, synthetic construct
KTGN

SEQ ID NO: 5650 - protein, 4 aa, synthetic construct
KNAI

SEQ ID NO: 5651 - protein, 4 aa, synthetic construct
KAEN

SEQ ID NO: 5652 - protein, 4 aa, synthetic construct
KAET

SEQ ID NO: 5653 - protein, 4 aa, synthetic construct
KTVH

SEQ ID NO: 5654 - protein, 4 aa, synthetic construct
KETA

SEQ ID NO: 5655 - protein, 4 aa, synthetic construct
KNNL

SEQ ID NO: 5656 - protein, 4 aa, synthetic construct
EAIN

SEQ ID NO: 5657 - protein, 4 aa, synthetic construct
KSLN

SEQ ID NO: 5658 - protein, 4 aa, synthetic construct
KTIP

SEQ ID NO: 5659 - protein, 4 aa, synthetic construct
KTIH

SEQ ID NO: 5660 - protein, 18 aa, synthetic construct
KTINGSGSPHSKAQNQQT

SEQ ID NO: 5661 - protein, 5 aa, synthetic construct
NPHKS

SEQ ID NO: 5662 - protein, 6 aa, synthetic construct
NPHKSG

SEQ ID NO: 5663 - protein, 6 aa, synthetic construct
SPHKIV

SEQ ID NO: 5664 - protein, 6 aa, synthetic construct
GHDNPH

SEQ ID NO: 5665 - protein, 6 aa, synthetic construct
AHDSPH

SEQ ID NO: 5666 - protein, 6 aa, synthetic construct
KHDSPH

SEQ ID NO: 5667 - protein, 6 aa, synthetic construct
WHDSPH

SEQ ID NO: 5668 - protein, 6 aa, synthetic construct
RHDSPH

SEQ ID NO: 5669 - protein, 6 aa, synthetic construct
LHDSPH

SEQ ID NO: 5670 - protein, 6 aa, synthetic construct
IHDSPH

SEQ ID NO: 5671 - protein, 6 aa, synthetic construct
MHDSPH

SEQ ID NO: 5672 - protein, 6 aa, synthetic construct
NHDSPH

SEQ ID NO: 5673 - protein, 6 aa, synthetic construct
THDSPH

SEQ ID NO: 5674 - protein, 6 aa, synthetic construct
EHDSPH

SEQ ID NO: 5675 - protein, 6 aa, synthetic construct
QHDSPH

SEQ ID NO: 5676 - protein, 6 aa, synthetic construct
YHDSPH

SEQ ID NO: 5677 - protein, 6 aa, synthetic construct
HHDSPH

SEQ ID NO: 5678 - protein, 6 aa, synthetic construct
FHDSPH

SEQ ID NO: 5679 - protein, 6 aa, synthetic construct
VHDSPH

SEQ ID NO: 5680 - protein, 9 aa, synthetic construct
GHDNPHKSG

SEQ ID NO: 5681 - protein, 9 aa, synthetic construct
AHDSPHKSG

SEQ ID NO: 5682 - protein, 9 aa, synthetic construct
AHDSPHKIG

SEQ ID NO: 5683 - protein, 9 aa, synthetic construct
KHDSPHKSG

SEQ ID NO: 5684 - protein, 9 aa, synthetic construct
WHDSPHKSG

SEQ ID NO: 5685 - protein, 9 aa, synthetic construct
RHDSPHKSG

SEQ ID NO: 5686 - protein, 9 aa, synthetic construct
LHDSPHKSG

SEQ ID NO: 5687 - protein, 9 aa, synthetic construct
IHDSPHKSG

SEQ ID NO: 5688 - protein, 9 aa, synthetic construct
MHDSPHKSG

SEQ ID NO: 5689 - protein, 9 aa, synthetic construct
NHDSPHKSG

SEQ ID NO: 5690 - protein, 9 aa, synthetic construct
THDSPHKSG

SEQ ID NO: 5691 - protein, 9 aa, synthetic construct
EHDSPHKSG

SEQ ID NO: 5692 - protein, 9 aa, synthetic construct
QHDSPHKSG

SEQ ID NO: 5693 - protein, 9 aa, synthetic construct
RHDSPHKIV

SEQ ID NO: 5694 - protein, 9 aa, synthetic construct
YHDSPHKSG

SEQ ID NO: 5695 - protein, 9 aa, synthetic construct
HHDSPHKSG

SEQ ID NO: 5696 - protein, 9 aa, synthetic construct
FHDSPHKSG

SEQ ID NO: 5697 - protein, 9 aa, synthetic construct
VHDSPHKSG

SEQ ID NO: 5698 - protein, 5 aa, synthetic construct
QIRQT

SEQ ID NO: 5699 - protein, 5 aa, synthetic construct
QNQHA

SEQ ID NO: 5700 - protein, 5 aa, synthetic construct
QSVQT

SEQ ID NO: 5701 - protein, 5 aa, synthetic construct
RSQQT

SEQ ID NO: 5702 - protein, 5 aa, synthetic construct
QNKLE

SEQ ID NO: 5703 - protein, 5 aa, synthetic construct
QNQQK

SEQ ID NO: 5704 - protein, 5 aa, synthetic construct
QHQQA

SEQ ID NO: 5705 - protein, 5 aa, synthetic construct
QIQHT

SEQ ID NO: 5706 - protein, 5 aa, synthetic construct
PRQQT

SEQ ID NO: 5707 - protein, 5 aa, synthetic construct
HTQQT

SEQ ID NO: 5708 - protein, 5 aa, synthetic construct
QRQHT

SEQ ID NO: 5709 - protein, 5 aa, synthetic construct
QNQQS

SEQ ID NO: 5710 - protein, 5 aa, synthetic construct
RNQET

SEQ ID NO: 5711 - protein, 5 aa, synthetic construct
KNQQT

SEQ ID NO: 5712 - protein, 5 aa, synthetic construct
QTQQT

SEQ ID NO: 5713 - protein, 5 aa, synthetic construct
QTQQI

SEQ ID NO: 5714 - protein, 5 aa, synthetic construct
QSKQA

SEQ ID NO: 5715 - protein, 5 aa, synthetic construct
QNQPP

SEQ ID NO: 5716 - protein, 5 aa, synthetic construct
QSPQT

SEQ ID NO: 5717 - protein, 5 aa, synthetic construct
QNQQG

SEQ ID NO: 5718 - protein, 5 aa, synthetic construct
QNQHT

SEQ ID NO: 5719 - protein, 5 aa, synthetic construct
QTRQT

SEQ ID NO: 5720 - protein, 5 aa, synthetic construct
QNLHT

SEQ ID NO: 5721 - protein, 5 aa, synthetic construct
QNQET

SEQ ID NO: 5722 - protein, 5 aa, synthetic construct
LNQPT

SEQ ID NO: 5723 - protein, 5 aa, synthetic construct
QNQDT

SEQ ID NO: 5724 - protein, 5 aa, synthetic construct
RNQQT

SEQ ID NO: 5725 - protein, 5 aa, synthetic construct
QNLLT

SEQ ID NO: 5726 - protein, 5 aa, synthetic construct
QLVIT

SEQ ID NO: 5727 - protein, 5 aa, synthetic construct
RTQET

SEQ ID NO: 5728 - protein, 5 aa, synthetic construct
QTHQT

SEQ ID NO: 5729 - protein, 5 aa, synthetic construct
QNQPA

SEQ ID NO: 5730 - protein, 5 aa, synthetic construct
QDQHT

SEQ ID NO: 5731 - protein, 5 aa, synthetic construct
QSQHT

SEQ ID NO: 5732 - protein, 5 aa, synthetic construct
RNQQI

SEQ ID NO: 5733 - protein, 5 aa, synthetic construct
VRQQT

SEQ ID NO: 5734 - protein, 5 aa, synthetic construct
QNQHS

SEQ ID NO: 5735 - protein, 5 aa, synthetic construct
AWQQT

SEQ ID NO: 5736 - protein, 5 aa, synthetic construct
QSVPT

SEQ ID NO: 5737 - protein, 5 aa, synthetic construct
QNIQP

SEQ ID NO: 5738 - protein, 5 aa, synthetic construct
QNHLN

SEQ ID NO: 5739 - protein, 5 aa, synthetic construct
LDQQT

SEQ ID NO: 5740 - protein, 5 aa, synthetic construct
PDQQS

SEQ ID NO: 5741 - protein, 5 aa, synthetic construct
ESQQT

SEQ ID NO: 5742 - protein, 5 aa, synthetic construct
QNKQT

SEQ ID NO: 5743 - protein, 5 aa, synthetic construct
QRQLT

SEQ ID NO: 5744 - protein, 5 aa, synthetic construct
QIIVT

SEQ ID NO: 5745 - protein, 5 aa, synthetic construct
QKQST

SEQ ID NO: 5746 - protein, 5 aa, synthetic construct
QSHQT

SEQ ID NO: 5747 - protein, 5 aa, synthetic construct
QFVVT

SEQ ID NO: 5748 - protein, 5 aa, synthetic construct
QSQPT

SEQ ID NO: 5749 - protein, 5 aa, synthetic construct
QNEQT

SEQ ID NO: 5750 - protein, 5 aa, synthetic construct
RNRQT

SEQ ID NO: 5751 - protein, 5 aa, synthetic construct
QSKQT

SEQ ID NO: 5752 - protein, 5 aa, synthetic construct
QNPLT

SEQ ID NO: 5753 - protein, 5 aa, synthetic construct
RDQKT

SEQ ID NO: 5754 - protein, 5 aa, synthetic construct
HNQQN

SEQ ID NO: 5755 - protein, 5 aa, synthetic construct
QWKRT

SEQ ID NO: 5756 - protein, 5 aa, synthetic construct
QNHQI

SEQ ID NO: 5757 - protein, 5 aa, synthetic construct
QNQQA

SEQ ID NO: 5758 - protein, 5 aa, synthetic construct
QNQLN

SEQ ID NO: 5759 - protein, 5 aa, synthetic construct
QTQPT

SEQ ID NO: 5760 - protein, 5 aa, synthetic construct
QKQLT

SEQ ID NO: 5761 - protein, 5 aa, synthetic construct
RNQLA

SEQ ID NO: 5762 - protein, 5 aa, synthetic construct
RNQQS

SEQ ID NO: 5763 - protein, 5 aa, synthetic construct
ISIQT

SEQ ID NO: 5764 - protein, 5 aa, synthetic construct
QNQQN

SEQ ID NO: 5765 - protein, 5 aa, synthetic construct
QSQQS

SEQ ID NO: 5766 - protein, 5 aa, synthetic construct
QTVCT

SEQ ID NO: 5767 - protein, 5 aa, synthetic construct
QYQQI

SEQ ID NO: 5768 - protein, 5 aa, synthetic construct
QQIMT

SEQ ID NO: 5769 - protein, 5 aa, synthetic construct
QNEQS

SEQ ID NO: 5770 - protein, 5 aa, synthetic construct
LNHQT

SEQ ID NO: 5771 - protein, 5 aa, synthetic construct
QMIHT

SEQ ID NO: 5772 - protein, 5 aa, synthetic construct
RNHQS

SEQ ID NO: 5773 - protein, 5 aa, synthetic construct
QKMNT

SEQ ID NO: 5774 - protein, 5 aa, synthetic construct
QSQQN

SEQ ID NO: 5775 - protein, 4 aa, synthetic construct
KSIY

SEQ ID NO: 5776 - protein, 4 aa, synthetic construct
KIIN

SEQ ID NO: 5777 - protein, 4 aa, synthetic construct
KAII

SEQ ID NO: 5778 - protein, 4 aa, synthetic construct
KAIS

SEQ ID NO: 5779 - protein, 4 aa, synthetic construct
KTVD

SEQ ID NO: 5780 - protein, 4 aa, synthetic construct
KTIE

SEQ ID NO: 5781 - protein, 4 aa, synthetic construct
KTIY

SEQ ID NO: 5782 - protein, 4 aa, synthetic construct
KNVV

SEQ ID NO: 5783 - protein, 4 aa, synthetic construct
KTDA

SEQ ID NO: 5784 - protein, 4 aa, synthetic construct
KTEM

SEQ ID NO: 5785 - protein, 4 aa, synthetic construct
KIVN

SEQ ID NO: 5786 - protein, 4 aa, synthetic construct
KIGN

SEQ ID NO: 5787 - protein, 4 aa, synthetic construct
KEVM

SEQ ID NO: 5788 - protein, 4 aa, synthetic construct
KYQV

SEQ ID NO: 5789 - protein, 4 aa, synthetic construct
KTVE

SEQ ID NO: 5790 - protein, 4 aa, synthetic construct
KAID

SEQ ID NO: 5791 - protein, 4 aa, synthetic construct
KTIM

SEQ ID NO: 5792 - protein, 4 aa, synthetic construct
KEVG

SEQ ID NO: 5793 - protein, 4 aa, synthetic construct
KSEM

SEQ ID NO: 5794 - protein, 4 aa, synthetic construct
KAQQ

SEQ ID NO: 5795 - protein, 4 aa, synthetic construct
KCGE

SEQ ID NO: 5796 - protein, 4 aa, synthetic construct
KASN

SEQ ID NO: 5797 - protein, 4 aa, synthetic construct
KTIG

SEQ ID NO: 5798 - protein, 4 aa, synthetic construct
KTDP

SEQ ID NO: 5799 - protein, 4 aa, synthetic construct
KELV

SEQ ID NO: 5800 - protein, 4 aa, synthetic construct
KELM

SEQ ID NO: 5801 - protein, 4 aa, synthetic construct
KNEI

SEQ ID NO: 5802 - protein, 4 aa, synthetic construct
KTPN

SEQ ID NO: 5803 - protein, 4 aa, synthetic construct
KITN

SEQ ID NO: 5804 - protein, 4 aa, synthetic construct
KTDI

SEQ ID NO: 5805 - protein, 4 aa, synthetic construct
KTDQ

SEQ ID NO: 5806 - protein, 4 aa, synthetic construct
KGIN

SEQ ID NO: 5807 - protein, 4 aa, synthetic construct
KSEI

SEQ ID NO: 5808 - protein, 4 aa, synthetic construct
KWSA

SEQ ID NO: 5809 - protein, 4 aa, synthetic construct
KELA

SEQ ID NO: 5810 - protein, 4 aa, synthetic construct
KQTQ

SEQ ID NO: 5811 - protein, 4 aa, synthetic construct
KGAD

SEQ ID NO: 5812 - protein, 4 aa, synthetic construct
KVGE

SEQ ID NO: 5813 - protein, 4 aa, synthetic construct
KANE

SEQ ID NO: 5814 - protein, 4 aa, synthetic construct
KTDT

SEQ ID NO: 5815 - protein, 4 aa, synthetic construct
KTCI

SEQ ID NO: 5816 - protein, 4 aa, synthetic construct
KELR

SEQ ID NO: 5817 - protein, 4 aa, synthetic construct
KCQI

SEQ ID NO: 5818 - protein, 4 aa, synthetic construct
KGVM

SEQ ID NO: 5819 - protein, 4 aa, synthetic construct
KACD

SEQ ID NO: 5820 - protein, 4 aa, synthetic construct
KNEL

SEQ ID NO: 5821 - protein, 4 aa, synthetic construct
KAAE

SEQ ID NO: 5822 - protein, 4 aa, synthetic construct
KGQN

SEQ ID NO: 5823 - protein, 4 aa, synthetic construct
KNEF

SEQ ID NO: 5824 - protein, 4 aa, synthetic construct
KTSI

SEQ ID NO: 5825 - protein, 4 aa, synthetic construct
KCDQ

SEQ ID NO: 5826 - protein, 4 aa, synthetic construct
KEIL

SEQ ID NO: 5827 - protein, 4 aa, synthetic construct
KTPD

SEQ ID NO: 5828 - protein, 18 aa, synthetic construct
KTINGHDSPHKSGQNQQT

SEQ ID NO: 5829 - protein, 4 aa, synthetic construct
SKAQ

SEQ ID NO: 5830 - protein, 4 aa, synthetic construct
SMYM

SEQ ID NO: 5831 - protein, 4 aa, synthetic construct
SKAF

SEQ ID NO: 5832 - protein, 4 aa, synthetic construct
SKLK

SEQ ID NO: 5833 - protein, 4 aa, synthetic construct
SKRH

SEQ ID NO: 5834 - protein, 4 aa, synthetic construct
SKWR

SEQ ID NO: 5835 - protein, 4 aa, synthetic construct
SRCR

SEQ ID NO: 5836 - protein, 4 aa, synthetic construct
SFTC

SEQ ID NO: 5837 - protein, 4 aa, synthetic construct
SKFF

SEQ ID NO: 5838 - protein, 4 aa, synthetic construct
IVWQ

SEQ ID NO: 5839 - protein, 4 aa, synthetic construct
SKYF

SEQ ID NO: 5840 - protein, 4 aa, synthetic construct
SKAR

SEQ ID NO: 5841 - protein, 4 aa, synthetic construct
SCHQ

SEQ ID NO: 5842 - protein, 4 aa, synthetic construct
FPWQ

SEQ ID NO: 5843 - protein, 4 aa, synthetic construct
SKIR

SEQ ID NO: 5844 - protein, 4 aa, synthetic construct
VYYQ

SEQ ID NO: 5845 - protein, 4 aa, synthetic construct
SLYW

SEQ ID NO: 5846 - protein, 4 aa, synthetic construct
SKPK

SEQ ID NO: 5847 - protein, 4 aa, synthetic construct
SRFW

SEQ ID NO: 5848 - protein, 4 aa, synthetic construct
SRMR

SEQ ID NO: 5849 - protein, 4 aa, synthetic construct
SVKK

SEQ ID NO: 5850 - protein, 4 aa, synthetic construct
SWAP

SEQ ID NO: 5851 - protein, 4 aa, synthetic construct
SLWK

SEQ ID NO: 5852 - protein, 4 aa, synthetic construct
SFRP

SEQ ID NO: 5853 - protein, 4 aa, synthetic construct
SKKV

SEQ ID NO: 5854 - protein, 4 aa, synthetic construct
SYAF

SEQ ID NO: 5855 - protein, 4 aa, synthetic construct
SKAC

SEQ ID NO: 5856 - protein, 4 aa, synthetic construct
SKRL

SEQ ID NO: 5857 - protein, 4 aa, synthetic construct
SCSR

SEQ ID NO: 5858 - protein, 4 aa, synthetic construct
SRCP

SEQ ID NO: 5859 - protein, 4 aa, synthetic construct
SGAC

SEQ ID NO: 5860 - protein, 4 aa, synthetic construct
SKFR

SEQ ID NO: 5861 - protein, 4 aa, synthetic construct
SFPF

SEQ ID NO: 5862 - protein, 4 aa, synthetic construct
SFFG

SEQ ID NO: 5863 - protein, 4 aa, synthetic construct
SMCQ

SEQ ID NO: 5864 - protein, 4 aa, synthetic construct
SKLF

SEQ ID NO: 5865 - protein, 4 aa, synthetic construct
SKTR

SEQ ID NO: 5866 - protein, 4 aa, synthetic construct
SGKR

SEQ ID NO: 5867 - protein, 4 aa, synthetic construct
FYRQ

SEQ ID NO: 5868 - protein, 4 aa, synthetic construct
CRVQ

SEQ ID NO: 5869 - protein, 4 aa, synthetic construct
YGIQ

SEQ ID NO: 5870 - protein, 4 aa, synthetic construct
VNCQ

SEQ ID NO: 5871 - protein, 4 aa, synthetic construct
SKPF

SEQ ID NO: 5872 - protein, 4 aa, synthetic construct
SLAW

SEQ ID NO: 5873 - protein, 4 aa, synthetic construct
SKRS

SEQ ID NO: 5874 - protein, 4 aa, synthetic construct
WSYQ

SEQ ID NO: 5875 - protein, 4 aa, synthetic construct
RWLQ

SEQ ID NO: 5876 - protein, 4 aa, synthetic construct
PSCQ

SEQ ID NO: 5877 - protein, 4 aa, synthetic construct
SSWL

SEQ ID NO: 5878 - protein, 4 aa, synthetic construct
SKRR

SEQ ID NO: 5879 - protein, 4 aa, synthetic construct
SKGC

SEQ ID NO: 5880 - protein, 4 aa, synthetic construct
VPWQ

SEQ ID NO: 5881 - protein, 4 aa, synthetic construct
SKRY

SEQ ID NO: 5882 - protein, 4 aa, synthetic construct
SGCQ

SEQ ID NO: 5883 - protein, 4 aa, synthetic construct
SFTP

SEQ ID NO: 5884 - protein, 4 aa, synthetic construct
STTC

SEQ ID NO: 5885 - protein, 4 aa, synthetic construct
PKRQ

SEQ ID NO: 5886 - protein, 4 aa, synthetic construct
SKCF

SEQ ID NO: 5887 - protein, 4 aa, synthetic construct
WVPQ

SEQ ID NO: 5888 - protein, 4 aa, synthetic construct
SFWS

SEQ ID NO: 5889 - protein, 4 aa, synthetic construct
SKFK

SEQ ID NO: 5890 - protein, 4 aa, synthetic construct
RIKQ

SEQ ID NO: 5891 - protein, 4 aa, synthetic construct
SKAP

SEQ ID NO: 5892 - protein, 4 aa, synthetic construct
SFRY

SEQ ID NO: 5893 - protein, 4 aa, synthetic construct
SKMI

SEQ ID NO: 5894 - protein, 4 aa, synthetic construct
LRWQ

SEQ ID NO: 5895 - protein, 4 aa, synthetic construct
LPTQ

SEQ ID NO: 5896 - protein, 4 aa, synthetic construct
SKWK

SEQ ID NO: 5897 - protein, 4 aa, synthetic construct
SYMR

SEQ ID NO: 5898 - protein, 4 aa, synthetic construct
SKAA

SEQ ID NO: 5899 - protein, 4 aa, synthetic construct
LLCQ

SEQ ID NO: 5900 - protein, 4 aa, synthetic construct
RCCQ

SEQ ID NO: 5901 - protein, 4 aa, synthetic construct
LCVQ

SEQ ID NO: 5902 - protein, 4 aa, synthetic construct
SKLT

SEQ ID NO: 5903 - protein, 4 aa, synthetic construct
SKLC

SEQ ID NO: 5904 - protein, 4 aa, synthetic construct
SYLV

SEQ ID NO: 5905 - protein, 4 aa, synthetic construct
QGCQ

SEQ ID NO: 5906 - protein, 4 aa, synthetic construct
MAFQ

SEQ ID NO: 5907 - protein, 4 aa, synthetic construct
SKWG

SEQ ID NO: 5908 - protein, 4 aa, synthetic construct
SKIL

SEQ ID NO: 5909 - protein, 4 aa, synthetic construct
SFQI

SEQ ID NO: 5910 - protein, 4 aa, synthetic construct
SKAL

SEQ ID NO: 5911 - protein, 4 aa, synthetic construct
SKAH

SEQ ID NO: 5912 - protein, 4 aa, synthetic construct
SLCL

SEQ ID NO: 5913 - protein, 4 aa, synthetic construct
RPWQ

SEQ ID NO: 5914 - protein, 4 aa, synthetic construct
RPRQ

SEQ ID NO: 5915 - protein, 4 aa, synthetic construct
SCPQ

SEQ ID NO: 5916 - protein, 4 aa, synthetic construct
SVRY

SEQ ID NO: 5917 - protein, 4 aa, synthetic construct
SVRC

SEQ ID NO: 5918 - protein, 4 aa, synthetic construct
SKMP

SEQ ID NO: 5919 - protein, 4 aa, synthetic construct
SKKT

SEQ ID NO: 5920 - protein, 4 aa, synthetic construct
SLPY

SEQ ID NO: 5921 - protein, 4 aa, synthetic construct
VYHQ

SEQ ID NO: 5922 - protein, 4 aa, synthetic construct
SYTR

SEQ ID NO: 5923 - protein, 4 aa, synthetic construct
LVYQ

SEQ ID NO: 5924 - protein, 4 aa, synthetic construct
YRYQ

SEQ ID NO: 5925 - protein, 4 aa, synthetic construct
SWLK

SEQ ID NO: 5926 - protein, 4 aa, synthetic construct
CPAQ

SEQ ID NO: 5927 - protein, 4 aa, synthetic construct
SMCT

SEQ ID NO: 5928 - protein, 4 aa, synthetic construct
SPPD

SEQ ID NO: 5929 - protein, 4 aa, synthetic construct
SKRN

SEQ ID NO: 5930 - protein, 4 aa, synthetic construct
RWTQ

SEQ ID NO: 5931 - protein, 4 aa, synthetic construct
PRKQ

SEQ ID NO: 5932 - protein, 4 aa, synthetic construct
SKCS

SEQ ID NO: 5933 - protein, 4 aa, synthetic construct
PFVQ

SEQ ID NO: 5934 - protein, 4 aa, synthetic construct
SKLP

SEQ ID NO: 5935 - protein, 4 aa, synthetic construct
SKSE

SEQ ID NO: 5936 - protein, 4 aa, synthetic construct
WVAQ

SEQ ID NO: 5937 - protein, 4 aa, synthetic construct
SLYQ

SEQ ID NO: 5938 - protein, 4 aa, synthetic construct
SKVR

SEQ ID NO: 5939 - protein, 4 aa, synthetic construct
CALQ

SEQ ID NO: 5940 - protein, 4 aa, synthetic construct
SSCT

SEQ ID NO: 5941 - protein, 4 aa, synthetic construct
SKNS

SEQ ID NO: 5942 - protein, 4 aa, synthetic construct
SKRK

SEQ ID NO: 5943 - protein, 4 aa, synthetic construct
LCTQ

SEQ ID NO: 5944 - protein, 4 aa, synthetic construct
STCL

SEQ ID NO: 5945 - protein, 4 aa, synthetic construct
SYAR

SEQ ID NO: 5946 - protein, 4 aa, synthetic construct
SKQR

SEQ ID NO: 5947 - protein, 4 aa, synthetic construct
SKRV

SEQ ID NO: 5948 - protein, 4 aa, synthetic construct
KSGQ

SEQ ID NO: 5949 - protein, 4 aa, synthetic construct
SYYS

SEQ ID NO: 5950 - protein, 4 aa, synthetic construct
SLTC

SEQ ID NO: 5951 - protein, 4 aa, synthetic construct
SCQS

SEQ ID NO: 5952 - protein, 4 aa, synthetic construct
SKAK

SEQ ID NO: 5953 - protein, 4 aa, synthetic construct
SKPQ

SEQ ID NO: 5954 - protein, 4 aa, synthetic construct
FPFQ

SEQ ID NO: 5955 - protein, 4 aa, synthetic construct
SKCT

SEQ ID NO: 5956 - protein, 4 aa, synthetic construct
SVFE

SEQ ID NO: 5957 - protein, 4 aa, synthetic construct
GRYQ

SEQ ID NO: 5958 - protein, 4 aa, synthetic construct
KAQA

SEQ ID NO: 5959 - protein, 4 aa, synthetic construct
KAQN

SEQ ID NO: 5960 - protein, 4 aa, synthetic construct
MYMN

SEQ ID NO: 5961 - protein, 4 aa, synthetic construct
KAFY

SEQ ID NO: 5962 - protein, 4 aa, synthetic construct
KLKR

SEQ ID NO: 5963 - protein, 4 aa, synthetic construct
KRHR

SEQ ID NO: 5964 - protein, 4 aa, synthetic construct
KAQK

SEQ ID NO: 5965 - protein, 4 aa, synthetic construct
KWRL

SEQ ID NO: 5966 - protein, 4 aa, synthetic construct
RCRN

SEQ ID NO: 5967 - protein, 4 aa, synthetic construct
FTCN

SEQ ID NO: 5968 - protein, 4 aa, synthetic construct
KFFI

SEQ ID NO: 5969 - protein, 4 aa, synthetic construct
KAQY

SEQ ID NO: 5970 - protein, 4 aa, synthetic construct
VWQN

SEQ ID NO: 5971 - protein, 4 aa, synthetic construct
KYFM

SEQ ID NO: 5972 - protein, 4 aa, synthetic construct
KARQ

SEQ ID NO: 5973 - protein, 4 aa, synthetic construct
CHQN

SEQ ID NO: 5974 - protein, 4 aa, synthetic construct
PWQN

SEQ ID NO: 5975 - protein, 4 aa, synthetic construct
KIRR

SEQ ID NO: 5976 - protein, 4 aa, synthetic construct
YYQN

SEQ ID NO: 5977 - protein, 4 aa, synthetic construct
LYWN

SEQ ID NO: 5978 - protein, 4 aa, synthetic construct
KPKR

SEQ ID NO: 5979 - protein, 4 aa, synthetic construct
KAFS

SEQ ID NO: 5980 - protein, 4 aa, synthetic construct
RFWN

SEQ ID NO: 5981 - protein, 4 aa, synthetic construct
KAQC

SEQ ID NO: 5982 - protein, 4 aa, synthetic construct
RMRN

SEQ ID NO: 5983 - protein, 4 aa, synthetic construct
VKKN

SEQ ID NO: 5984 - protein, 4 aa, synthetic construct
WAPN

SEQ ID NO: 5985 - protein, 4 aa, synthetic construct
LWKN

SEQ ID NO: 5986 - protein, 4 aa, synthetic construct
KARW

SEQ ID NO: 5987 - protein, 4 aa, synthetic construct
FRPN

SEQ ID NO: 5988 - protein, 4 aa, synthetic construct
KKVF

SEQ ID NO: 5989 - protein, 4 aa, synthetic construct
YAFN

SEQ ID NO: 5990 - protein, 4 aa, synthetic construct
KACS

SEQ ID NO: 5991 - protein, 4 aa, synthetic construct
KRLW

SEQ ID NO: 5992 - protein, 4 aa, synthetic construct
CSRN

SEQ ID NO: 5993 - protein, 4 aa, synthetic construct
RCPN

SEQ ID NO: 5994 - protein, 4 aa, synthetic construct
GACN

SEQ ID NO: 5995 - protein, 4 aa, synthetic construct
KFRQ

SEQ ID NO: 5996 - protein, 4 aa, synthetic construct
FPFN

SEQ ID NO: 5997 - protein, 4 aa, synthetic construct
FFGN

SEQ ID NO: 5998 - protein, 4 aa, synthetic construct
MCQN

SEQ ID NO: 5999 - protein, 4 aa, synthetic construct
KLFW

SEQ ID NO: 6000 - protein, 4 aa, synthetic construct
KTRK

SEQ ID NO: 6001 - protein, 4 aa, synthetic construct
GKRN

SEQ ID NO: 6002 - protein, 4 aa, synthetic construct
YRQN

SEQ ID NO: 6003 - protein, 4 aa, synthetic construct
RVQN

SEQ ID NO: 6004 - protein, 4 aa, synthetic construct
GIQN

SEQ ID NO: 6005 - protein, 4 aa, synthetic construct
KAQR

SEQ ID NO: 6006 - protein, 4 aa, synthetic construct
NCQN

SEQ ID NO: 6007 - protein, 4 aa, synthetic construct
KPFR

SEQ ID NO: 6008 - protein, 4 aa, synthetic construct
LAWN

SEQ ID NO: 6009 - protein, 4 aa, synthetic construct
KRSY

SEQ ID NO: 6010 - protein, 4 aa, synthetic construct
SYQN

SEQ ID NO: 6011 - protein, 4 aa, synthetic construct
WLQN

SEQ ID NO: 6012 - protein, 4 aa, synthetic construct
SCQN

SEQ ID NO: 6013 - protein, 4 aa, synthetic construct
SWLN

SEQ ID NO: 6014 - protein, 4 aa, synthetic construct
KRRA

SEQ ID NO: 6015 - protein, 4 aa, synthetic construct
KAQT

SEQ ID NO: 6016 - protein, 4 aa, synthetic construct
KGCT

SEQ ID NO: 6017 - protein, 4 aa, synthetic construct
KRYT

SEQ ID NO: 6018 - protein, 4 aa, synthetic construct
GCQN

SEQ ID NO: 6019 - protein, 4 aa, synthetic construct
FTPN

SEQ ID NO: 6020 - protein, 4 aa, synthetic construct
TTCN

SEQ ID NO: 6021 - protein, 4 aa, synthetic construct
KARM

SEQ ID NO: 6022 - protein, 4 aa, synthetic construct
KRQN

SEQ ID NO: 6023 - protein, 4 aa, synthetic construct
KCFL

SEQ ID NO: 6024 - protein, 4 aa, synthetic construct
VPQN

SEQ ID NO: 6025 - protein, 4 aa, synthetic construct
FWSN

SEQ ID NO: 6026 - protein, 4 aa, synthetic construct
KFKN

SEQ ID NO: 6027 - protein, 4 aa, synthetic construct
IKQN

SEQ ID NO: 6028 - protein, 4 aa, synthetic construct
KAPR

SEQ ID NO: 6029 - protein, 4 aa, synthetic construct
FRYN

SEQ ID NO: 6030 - protein, 4 aa, synthetic construct
KMIC

SEQ ID NO: 6031 - protein, 4 aa, synthetic construct
RWQN

SEQ ID NO: 6032 - protein, 4 aa, synthetic construct
PTQN

SEQ ID NO: 6033 - protein, 4 aa, synthetic construct
KWKS

SEQ ID NO: 6034 - protein, 4 aa, synthetic construct
YMRN

SEQ ID NO: 6035 - protein, 4 aa, synthetic construct
KAAR

SEQ ID NO: 6036 - protein, 4 aa, synthetic construct
LCQN

SEQ ID NO: 6037 - protein, 4 aa, synthetic construct
CCQN

SEQ ID NO: 6038 - protein, 4 aa, synthetic construct
CVQN

SEQ ID NO: 6039 - protein, 4 aa, synthetic construct
KLTR

SEQ ID NO: 6040 - protein, 4 aa, synthetic construct
KLCT

SEQ ID NO: 6041 - protein, 4 aa, synthetic construct
KIRG

SEQ ID NO: 6042 - protein, 4 aa, synthetic construct
YLVN

SEQ ID NO: 6043 - protein, 4 aa, synthetic construct
AFQN

SEQ ID NO: 6044 - protein, 4 aa, synthetic construct
KACQ

SEQ ID NO: 6045 - protein, 4 aa, synthetic construct
KWGL

SEQ ID NO: 6046 - protein, 4 aa, synthetic construct
KILR

SEQ ID NO: 6047 - protein, 4 aa, synthetic construct
FQIN

SEQ ID NO: 6048 - protein, 4 aa, synthetic construct
KACI

SEQ ID NO: 6049 - protein, 4 aa, synthetic construct
KALR

SEQ ID NO: 6050 - protein, 4 aa, synthetic construct
KAHA

SEQ ID NO: 6051 - protein, 4 aa, synthetic construct
LCLN

SEQ ID NO: 6052 - protein, 4 aa, synthetic construct
KAFV

SEQ ID NO: 6053 - protein, 4 aa, synthetic construct
PRQN

SEQ ID NO: 6054 - protein, 4 aa, synthetic construct
CPQN

SEQ ID NO: 6055 - protein, 4 aa, synthetic construct
KAQF

SEQ ID NO: 6056 - protein, 4 aa, synthetic construct
VRYN

SEQ ID NO: 6057 - protein, 4 aa, synthetic construct
VRCN

SEQ ID NO: 6058 - protein, 4 aa, synthetic construct
KMPC

SEQ ID NO: 6059 - protein, 4 aa, synthetic construct
KKTS

SEQ ID NO: 6060 - protein, 4 aa, synthetic construct
LPYN

SEQ ID NO: 6061 - protein, 4 aa, synthetic construct
YHQN

SEQ ID NO: 6062 - protein, 4 aa, synthetic construct
KAQS

SEQ ID NO: 6063 - protein, 4 aa, synthetic construct
YTRN

SEQ ID NO: 6064 - protein, 4 aa, synthetic construct
VYQN

SEQ ID NO: 6065 - protein, 4 aa, synthetic construct
RYQN

SEQ ID NO: 6066 - protein, 4 aa, synthetic construct
WLKN

SEQ ID NO: 6067 - protein, 4 aa, synthetic construct
KAQM

SEQ ID NO: 6068 - protein, 4 aa, synthetic construct
PAQN

SEQ ID NO: 6069 - protein, 4 aa, synthetic construct
MCTN

SEQ ID NO: 6070 - protein, 4 aa, synthetic construct
PPDN

SEQ ID NO: 6071 - protein, 4 aa, synthetic construct
KRNY

SEQ ID NO: 6072 - protein, 4 aa, synthetic construct
WTQN

SEQ ID NO: 6073 - protein, 4 aa, synthetic construct
KACR

SEQ ID NO: 6074 - protein, 4 aa, synthetic construct
RKQN

SEQ ID NO: 6075 - protein, 4 aa, synthetic construct
KCSV

SEQ ID NO: 6076 - protein, 4 aa, synthetic construct
KARI

SEQ ID NO: 6077 - protein, 4 aa, synthetic construct
FVQN

SEQ ID NO: 6078 - protein, 4 aa, synthetic construct
KLPK

SEQ ID NO: 6079 - protein, 4 aa, synthetic construct
KSEQ

SEQ ID NO: 6080 - protein, 4 aa, synthetic construct
VAQN

SEQ ID NO: 6081 - protein, 4 aa, synthetic construct
LYQN

SEQ ID NO: 6082 - protein, 4 aa, synthetic construct
KVRM

SEQ ID NO: 6083 - protein, 4 aa, synthetic construct
ALQN

SEQ ID NO: 6084 - protein, 4 aa, synthetic construct
SCTN

SEQ ID NO: 6085 - protein, 4 aa, synthetic construct
KNSR

SEQ ID NO: 6086 - protein, 4 aa, synthetic construct
KRKR

SEQ ID NO: 6087 - protein, 4 aa, synthetic construct
CTQN

SEQ ID NO: 6088 - protein, 4 aa, synthetic construct
TCLN

SEQ ID NO: 6089 - protein, 4 aa, synthetic construct
YARN

SEQ ID NO: 6090 - protein, 4 aa, synthetic construct
KQRP

SEQ ID NO: 6091 - protein, 4 aa, synthetic construct
KRVV

SEQ ID NO: 6092 - protein, 4 aa, synthetic construct
SGQN

SEQ ID NO: 6093 - protein, 4 aa, synthetic construct
YYSN

SEQ ID NO: 6094 - protein, 4 aa, synthetic construct
LTCN

SEQ ID NO: 6095 - protein, 4 aa, synthetic construct
CQSN

SEQ ID NO: 6096 - protein, 4 aa, synthetic construct
KAKG

SEQ ID NO: 6097 - protein, 4 aa, synthetic construct
KPQN

SEQ ID NO: 6098 - protein, 4 aa, synthetic construct
PFQN

SEQ ID NO: 6099 - protein, 4 aa, synthetic construct
KCTS

SEQ ID NO: 6100 - protein, 4 aa, synthetic construct
VFEN

SEQ ID NO: 6101 - protein, 4 aa, synthetic construct
KAKK

SEQ ID NO: 6102 - protein, 5 aa, synthetic construct
SKAQA

SEQ ID NO: 6103 - protein, 5 aa, synthetic construct
SKAQN

SEQ ID NO: 6104 - protein, 5 aa, synthetic construct
SMYMN

SEQ ID NO: 6105 - protein, 5 aa, synthetic construct
SKAFY

SEQ ID NO: 6106 - protein, 5 aa, synthetic construct
SKLKR

SEQ ID NO: 6107 - protein, 5 aa, synthetic construct
SKRHR

SEQ ID NO: 6108 - protein, 5 aa, synthetic construct
SKAQK

SEQ ID NO: 6109 - protein, 5 aa, synthetic construct
SKWRL

SEQ ID NO: 6110 - protein, 5 aa, synthetic construct
SRCRN

SEQ ID NO: 6111 - protein, 5 aa, synthetic construct
SFTCN

SEQ ID NO: 6112 - protein, 5 aa, synthetic construct
SKFFI

SEQ ID NO: 6113 - protein, 5 aa, synthetic construct
SKAQY

SEQ ID NO: 6114 - protein, 5 aa, synthetic construct
IVWQN

SEQ ID NO: 6115 - protein, 5 aa, synthetic construct
SKYFM

SEQ ID NO: 6116 - protein, 5 aa, synthetic construct
SKARQ

SEQ ID NO: 6117 - protein, 5 aa, synthetic construct
SCHQN

SEQ ID NO: 6118 - protein, 5 aa, synthetic construct
FPWQN

SEQ ID NO: 6119 - protein, 5 aa, synthetic construct
SKIRR

SEQ ID NO: 6120 - protein, 5 aa, synthetic construct
VYYQN

SEQ ID NO: 6121 - protein, 5 aa, synthetic construct
SLYWN

SEQ ID NO: 6122 - protein, 5 aa, synthetic construct
SKPKR

SEQ ID NO: 6123 - protein, 5 aa, synthetic construct
SKAFS

SEQ ID NO: 6124 - protein, 5 aa, synthetic construct
SRFWN

SEQ ID NO: 6125 - protein, 5 aa, synthetic construct
SKAQC

SEQ ID NO: 6126 - protein, 5 aa, synthetic construct
SRMRN

SEQ ID NO: 6127 - protein, 5 aa, synthetic construct
SVKKN

SEQ ID NO: 6128 - protein, 5 aa, synthetic construct
SWAPN

SEQ ID NO: 6129 - protein, 5 aa, synthetic construct
SLWKN

SEQ ID NO: 6130 - protein, 5 aa, synthetic construct
SKARW

SEQ ID NO: 6131 - protein, 5 aa, synthetic construct
SFRPN

SEQ ID NO: 6132 - protein, 5 aa, synthetic construct
SKKVF

SEQ ID NO: 6133 - protein, 5 aa, synthetic construct
SYAFN

SEQ ID NO: 6134 - protein, 5 aa, synthetic construct
SKACS

SEQ ID NO: 6135 - protein, 5 aa, synthetic construct
SKRLW

SEQ ID NO: 6136 - protein, 5 aa, synthetic construct
SCSRN

SEQ ID NO: 6137 - protein, 5 aa, synthetic construct
SRCPN

SEQ ID NO: 6138 - protein, 5 aa, synthetic construct
SGACN

SEQ ID NO: 6139 - protein, 5 aa, synthetic construct
SKFRQ

SEQ ID NO: 6140 - protein, 5 aa, synthetic construct
SFPFN

SEQ ID NO: 6141 - protein, 5 aa, synthetic construct
SFFGN

SEQ ID NO: 6142 - protein, 5 aa, synthetic construct
SMCQN

SEQ ID NO: 6143 - protein, 5 aa, synthetic construct
SKLFW

SEQ ID NO: 6144 - protein, 5 aa, synthetic construct
SKTRK

SEQ ID NO: 6145 - protein, 5 aa, synthetic construct
SGKRN

SEQ ID NO: 6146 - protein, 5 aa, synthetic construct
FYRQN

SEQ ID NO: 6147 - protein, 5 aa, synthetic construct
CRVQN

SEQ ID NO: 6148 - protein, 5 aa, synthetic construct
YGIQN

SEQ ID NO: 6149 - protein, 5 aa, synthetic construct
SKAQR

SEQ ID NO: 6150 - protein, 5 aa, synthetic construct
VNCQN

SEQ ID NO: 6151 - protein, 5 aa, synthetic construct
SKPFR

SEQ ID NO: 6152 - protein, 5 aa, synthetic construct
SLAWN

SEQ ID NO: 6153 - protein, 5 aa, synthetic construct
SKRSY

SEQ ID NO: 6154 - protein, 5 aa, synthetic construct
WSYQN

SEQ ID NO: 6155 - protein, 5 aa, synthetic construct
RWLQN

SEQ ID NO: 6156 - protein, 5 aa, synthetic construct
PSCQN

SEQ ID NO: 6157 - protein, 5 aa, synthetic construct
SSWLN

SEQ ID NO: 6158 - protein, 5 aa, synthetic construct
SKRRA

SEQ ID NO: 6159 - protein, 5 aa, synthetic construct
SKAQT

SEQ ID NO: 6160 - protein, 5 aa, synthetic construct
SKGCT

SEQ ID NO: 6161 - protein, 5 aa, synthetic construct
VPWQN

SEQ ID NO: 6162 - protein, 5 aa, synthetic construct
SKRYT

SEQ ID NO: 6163 - protein, 5 aa, synthetic construct
SGCQN

SEQ ID NO: 6164 - protein, 5 aa, synthetic construct
SFTPN

SEQ ID NO: 6165 - protein, 5 aa, synthetic construct
STTCN

SEQ ID NO: 6166 - protein, 5 aa, synthetic construct
SKARM

SEQ ID NO: 6167 - protein, 5 aa, synthetic construct
PKRQN

SEQ ID NO: 6168 - protein, 5 aa, synthetic construct
SKCFL

SEQ ID NO: 6169 - protein, 5 aa, synthetic construct
WVPQN

SEQ ID NO: 6170 - protein, 5 aa, synthetic construct
SFWSN

SEQ ID NO: 6171 - protein, 5 aa, synthetic construct
SKFKN

SEQ ID NO: 6172 - protein, 5 aa, synthetic construct
RIKQN

SEQ ID NO: 6173 - protein, 5 aa, synthetic construct
SKAPR

SEQ ID NO: 6174 - protein, 5 aa, synthetic construct
SFRYN

SEQ ID NO: 6175 - protein, 5 aa, synthetic construct
SKMIC

SEQ ID NO: 6176 - protein, 5 aa, synthetic construct
LRWQN

SEQ ID NO: 6177 - protein, 5 aa, synthetic construct
LPTQN

SEQ ID NO: 6178 - protein, 5 aa, synthetic construct
SKWKS

SEQ ID NO: 6179 - protein, 5 aa, synthetic construct
SYMRN

SEQ ID NO: 6180 - protein, 5 aa, synthetic construct
SKAAR

SEQ ID NO: 6181 - protein, 5 aa, synthetic construct
LLCQN

SEQ ID NO: 6182 - protein, 5 aa, synthetic construct
RCCQN

SEQ ID NO: 6183 - protein, 5 aa, synthetic construct
LCVQN

SEQ ID NO: 6184 - protein, 5 aa, synthetic construct
SKLTR

SEQ ID NO: 6185 - protein, 5 aa, synthetic construct
SKLCT

SEQ ID NO: 6186 - protein, 5 aa, synthetic construct
SKIRG

SEQ ID NO: 6187 - protein, 5 aa, synthetic construct
SYLVN

SEQ ID NO: 6188 - protein, 5 aa, synthetic construct
QGCQN

SEQ ID NO: 6189 - protein, 5 aa, synthetic construct
MAFQN

SEQ ID NO: 6190 - protein, 5 aa, synthetic construct
SKACQ

SEQ ID NO: 6191 - protein, 5 aa, synthetic construct
SKWGL

SEQ ID NO: 6192 - protein, 5 aa, synthetic construct
SKILR

SEQ ID NO: 6193 - protein, 5 aa, synthetic construct
SFQIN

SEQ ID NO: 6194 - protein, 5 aa, synthetic construct
SKACI

SEQ ID NO: 6195 - protein, 5 aa, synthetic construct
SKALR

SEQ ID NO: 6196 - protein, 5 aa, synthetic construct
SKAHA

SEQ ID NO: 6197 - protein, 5 aa, synthetic construct
SLCLN

SEQ ID NO: 6198 - protein, 5 aa, synthetic construct
SKAFV

SEQ ID NO: 6199 - protein, 5 aa, synthetic construct
RPWQN

SEQ ID NO: 6200 - protein, 5 aa, synthetic construct
RPRQN

SEQ ID NO: 6201 - protein, 5 aa, synthetic construct
SCPQN

SEQ ID NO: 6202 - protein, 5 aa, synthetic construct
SKAQF

SEQ ID NO: 6203 - protein, 5 aa, synthetic construct
SVRYN

SEQ ID NO: 6204 - protein, 5 aa, synthetic construct
SVRCN

SEQ ID NO: 6205 - protein, 5 aa, synthetic construct
SKMPC

SEQ ID NO: 6206 - protein, 5 aa, synthetic construct
SKKTS

SEQ ID NO: 6207 - protein, 5 aa, synthetic construct
SLPYN

SEQ ID NO: 6208 - protein, 5 aa, synthetic construct
VYHQN

SEQ ID NO: 6209 - protein, 5 aa, synthetic construct
SKAQS

SEQ ID NO: 6210 - protein, 5 aa, synthetic construct
SYTRN

SEQ ID NO: 6211 - protein, 5 aa, synthetic construct
LVYQN

SEQ ID NO: 6212 - protein, 5 aa, synthetic construct
YRYQN

SEQ ID NO: 6213 - protein, 5 aa, synthetic construct
SWLKN

SEQ ID NO: 6214 - protein, 5 aa, synthetic construct
SKAQM

SEQ ID NO: 6215 - protein, 5 aa, synthetic construct
CPAQN

SEQ ID NO: 6216 - protein, 5 aa, synthetic construct
SMCTN

SEQ ID NO: 6217 - protein, 5 aa, synthetic construct
SPPDN

SEQ ID NO: 6218 - protein, 5 aa, synthetic construct
SKRNY

SEQ ID NO: 6219 - protein, 5 aa, synthetic construct
RWTQN

SEQ ID NO: 6220 - protein, 5 aa, synthetic construct
SKACR

SEQ ID NO: 6221 - protein, 5 aa, synthetic construct
PRKQN

SEQ ID NO: 6222 - protein, 5 aa, synthetic construct
SKCSV

SEQ ID NO: 6223 - protein, 5 aa, synthetic construct
SKARI

SEQ ID NO: 6224 - protein, 5 aa, synthetic construct
PFVQN

SEQ ID NO: 6225 - protein, 5 aa, synthetic construct
SKLPK

SEQ ID NO: 6226 - protein, 5 aa, synthetic construct
SKSEQ

SEQ ID NO: 6227 - protein, 5 aa, synthetic construct
WVAQN

SEQ ID NO: 6228 - protein, 5 aa, synthetic construct
SLYQN

SEQ ID NO: 6229 - protein, 5 aa, synthetic construct
SKVRM

SEQ ID NO: 6230 - protein, 5 aa, synthetic construct
CALQN

SEQ ID NO: 6231 - protein, 5 aa, synthetic construct
SSCTN

SEQ ID NO: 6232 - protein, 5 aa, synthetic construct
SKNSR

SEQ ID NO: 6233 - protein, 5 aa, synthetic construct
SKRKR

SEQ ID NO: 6234 - protein, 5 aa, synthetic construct
LCTQN

SEQ ID NO: 6235 - protein, 5 aa, synthetic construct
STCLN

SEQ ID NO: 6236 - protein, 5 aa, synthetic construct
SYARN

SEQ ID NO: 6237 - protein, 5 aa, synthetic construct
SKQRP

SEQ ID NO: 6238 - protein, 5 aa, synthetic construct
SKRVV

SEQ ID NO: 6239 - protein, 5 aa, synthetic construct
KSGQN

SEQ ID NO: 6240 - protein, 5 aa, synthetic construct
SYYSN

SEQ ID NO: 6241 - protein, 5 aa, synthetic construct
SLTCN

SEQ ID NO: 6242 - protein, 5 aa, synthetic construct
SCQSN

SEQ ID NO: 6243 - protein, 5 aa, synthetic construct
SKAKG

SEQ ID NO: 6244 - protein, 5 aa, synthetic construct
SKPQN

SEQ ID NO: 6245 - protein, 5 aa, synthetic construct
FPFQN

SEQ ID NO: 6246 - protein, 5 aa, synthetic construct
SKCTS

SEQ ID NO: 6247 - protein, 5 aa, synthetic construct
SVFEN

SEQ ID NO: 6248 - protein, 5 aa, synthetic construct
SKAKK

SEQ ID NO: 6249 - protein, 5 aa, synthetic construct
GRYQN

SEQ ID NO: 6250 - protein, 11 aa, synthetic construct
GSGSPHSKAQA

SEQ ID NO: 6251 - protein, 11 aa, synthetic construct
GSGSPHSKAQN

SEQ ID NO: 6252 - protein, 11 aa, synthetic construct
GSGSPHSMYMN

SEQ ID NO: 6253 - protein, 11 aa, synthetic construct
GSGSPHSKAFY

SEQ ID NO: 6254 - protein, 11 aa, synthetic construct
GSGSPHSKLKR

SEQ ID NO: 6255 - protein, 11 aa, synthetic construct
GSGSPHSKRHR

SEQ ID NO: 6256 - protein, 11 aa, synthetic construct
GSGSPHSKAQK

SEQ ID NO: 6257 - protein, 11 aa, synthetic construct
GSGSPHSKWRL

SEQ ID NO: 6258 - protein, 11 aa, synthetic construct
GSGSPHSRCRN

SEQ ID NO: 6259 - protein, 11 aa, synthetic construct
GSGSPHSFTCN

SEQ ID NO: 6260 - protein, 11 aa, synthetic construct
GSGSPHSKFFI

SEQ ID NO: 6261 - protein, 11 aa, synthetic construct
GSGSPHSKAQY

SEQ ID NO: 6262 - protein, 11 aa, synthetic construct
GSGSPHIVWQN

SEQ ID NO: 6263 - protein, 11 aa, synthetic construct
GSGSPHSKYFM

SEQ ID NO: 6264 - protein, 11 aa, synthetic construct
GSGSPHSKARQ

SEQ ID NO: 6265 - protein, 11 aa, synthetic construct
GSGSPHSCHQN

SEQ ID NO: 6266 - protein, 11 aa, synthetic construct
GSGSPHFPWQN

SEQ ID NO: 6267 - protein, 11 aa, synthetic construct
GSGSPHSKIRR

SEQ ID NO: 6268 - protein, 11 aa, synthetic construct
GSGSPHVYYQN

SEQ ID NO: 6269 - protein, 11 aa, synthetic construct
GSGSPHSLYWN

SEQ ID NO: 6270 - protein, 11 aa, synthetic construct
GSGSPHSKPKR

SEQ ID NO: 6271 - protein, 11 aa, synthetic construct
GSGSPHSKAFS

SEQ ID NO: 6272 - protein, 11 aa, synthetic construct
GSGSPHSRFWN

SEQ ID NO: 6273 - protein, 11 aa, synthetic construct
GSGSPHSKAQC

SEQ ID NO: 6274 - protein, 11 aa, synthetic construct
GSGSPHSRMRN

SEQ ID NO: 6275 - protein, 11 aa, synthetic construct
GSGSPHSVKKN

SEQ ID NO: 6276 - protein, 11 aa, synthetic construct
GSGSPHSWAPN

SEQ ID NO: 6277 - protein, 11 aa, synthetic construct
GSGSPHSLWKN

SEQ ID NO: 6278 - protein, 11 aa, synthetic construct
GSGSPHSKARW

SEQ ID NO: 6279 - protein, 11 aa, synthetic construct
GSGSPHSFRPN

SEQ ID NO: 6280 - protein, 11 aa, synthetic construct
GSGSPHSKKVF

SEQ ID NO: 6281 - protein, 11 aa, synthetic construct
GSGSPHSYAFN

SEQ ID NO: 6282 - protein, 11 aa, synthetic construct
GSGSPHSKACS

SEQ ID NO: 6283 - protein, 11 aa, synthetic construct
GSGSPHSKRLW

SEQ ID NO: 6284 - protein, 11 aa, synthetic construct
GSGSPHSCSRN

SEQ ID NO: 6285 - protein, 11 aa, synthetic construct
GSGSPHSRCPN

SEQ ID NO: 6286 - protein, 11 aa, synthetic construct
GSGSPHSGACN

SEQ ID NO: 6287 - protein, 11 aa, synthetic construct
GSGSPHSKFRQ

SEQ ID NO: 6288 - protein, 11 aa, synthetic construct
GSGSPHSFPFN

SEQ ID NO: 6289 - protein, 11 aa, synthetic construct
GSGSPHSFFGN

SEQ ID NO: 6290 - protein, 11 aa, synthetic construct
GSGSPHSMCQN

SEQ ID NO: 6291 - protein, 11 aa, synthetic construct
GSGSPHSKLFW

SEQ ID NO: 6292 - protein, 11 aa, synthetic construct
GSGSPHSKTRK

SEQ ID NO: 6293 - protein, 11 aa, synthetic construct
GSGSPHSGKRN

SEQ ID NO: 6294 - protein, 11 aa, synthetic construct
GSGSPHFYRQN

SEQ ID NO: 6295 - protein, 11 aa, synthetic construct
GSGSPHCRVQN

SEQ ID NO: 6296 - protein, 11 aa, synthetic construct
GSGSPHYGIQN

SEQ ID NO: 6297 - protein, 11 aa, synthetic construct
GSGSPHSKAQR

SEQ ID NO: 6298 - protein, 11 aa, synthetic construct
GSGSPHVNCQN

SEQ ID NO: 6299 - protein, 11 aa, synthetic construct
GSGSPHSKPFR

SEQ ID NO: 6300 - protein, 11 aa, synthetic construct
GSGSPHSLAWN

SEQ ID NO: 6301 - protein, 11 aa, synthetic construct
GSGSPHSKRSY

SEQ ID NO: 6302 - protein, 11 aa, synthetic construct
GSGSPHWSYQN

SEQ ID NO: 6303 - protein, 11 aa, synthetic construct
GSGSPHRWLQN

SEQ ID NO: 6304 - protein, 11 aa, synthetic construct
GSGSPHPSCQN

SEQ ID NO: 6305 - protein, 11 aa, synthetic construct
GSGSPHSSWLN

SEQ ID NO: 6306 - protein, 11 aa, synthetic construct
GSGSPHSKRRA

SEQ ID NO: 6307 - protein, 11 aa, synthetic construct
GSGSPHSKAQT

SEQ ID NO: 6308 - protein, 11 aa, synthetic construct
GSGSPHSKGCT

SEQ ID NO: 6309 - protein, 11 aa, synthetic construct
GSGSPHVPWQN

SEQ ID NO: 6310 - protein, 11 aa, synthetic construct
GSGSPHSKRYT

SEQ ID NO: 6311 - protein, 11 aa, synthetic construct
GSGSPHSGCQN

SEQ ID NO: 6312 - protein, 11 aa, synthetic construct
GSGSPHSFTPN

SEQ ID NO: 6313 - protein, 11 aa, synthetic construct
GSGSPHSTTCN

SEQ ID NO: 6314 - protein, 11 aa, synthetic construct
GSGSPHSKARM

SEQ ID NO: 6315 - protein, 11 aa, synthetic construct
GSGSPHPKRQN

SEQ ID NO: 6316 - protein, 11 aa, synthetic construct
GSGSPHSKCFL

SEQ ID NO: 6317 - protein, 11 aa, synthetic construct
GSGSPHWVPQN

SEQ ID NO: 6318 - protein, 11 aa, synthetic construct
GSGSPHSFWSN

SEQ ID NO: 6319 - protein, 11 aa, synthetic construct
GSGSPHSKFKN

SEQ ID NO: 6320 - protein, 11 aa, synthetic construct
GSGSPHRIKQN

SEQ ID NO: 6321 - protein, 11 aa, synthetic construct
GSGSPHSKAPR

SEQ ID NO: 6322 - protein, 11 aa, synthetic construct
GSGSPHSFRYN

SEQ ID NO: 6323 - protein, 11 aa, synthetic construct
GSGSPHSKMIC

SEQ ID NO: 6324 - protein, 11 aa, synthetic construct
GSGSPHLRWQN

SEQ ID NO: 6325 - protein, 11 aa, synthetic construct
GSGSPHLPTQN

SEQ ID NO: 6326 - protein, 11 aa, synthetic construct
GSGSPHSKWKS

SEQ ID NO: 6327 - protein, 11 aa, synthetic construct
GSGSPHSYMRN

SEQ ID NO: 6328 - protein, 11 aa, synthetic construct
GSGSPHSKAAR

SEQ ID NO: 6329 - protein, 11 aa, synthetic construct
GSGSPHLLCQN

SEQ ID NO: 6330 - protein, 11 aa, synthetic construct
GSGSPHRCCQN

SEQ ID NO: 6331 - protein, 11 aa, synthetic construct
GSGSPHLCVQN

SEQ ID NO: 6332 - protein, 11 aa, synthetic construct
GSGSPHSKLTR

SEQ ID NO: 6333 - protein, 11 aa, synthetic construct
GSGSPHSKLCT

SEQ ID NO: 6334 - protein, 11 aa, synthetic construct
GSGSPHSKIRG

SEQ ID NO: 6335 - protein, 11 aa, synthetic construct
GSGSPHSYLVN

SEQ ID NO: 6336 - protein, 11 aa, synthetic construct
GSGSPHQGCQN

SEQ ID NO: 6337 - protein, 11 aa, synthetic construct
GSGSPHMAFQN

SEQ ID NO: 6338 - protein, 11 aa, synthetic construct
GSGSPHSKACQ

SEQ ID NO: 6339 - protein, 11 aa, synthetic construct
GSGSPHSKWGL

SEQ ID NO: 6340 - protein, 11 aa, synthetic construct
GSGSPHSKILR

SEQ ID NO: 6341 - protein, 11 aa, synthetic construct
GSGSPHSFQIN

SEQ ID NO: 6342 - protein, 11 aa, synthetic construct
GSGSPHSKACI

SEQ ID NO: 6343 - protein, 11 aa, synthetic construct
GSGSPHSKALR

SEQ ID NO: 6344 - protein, 11 aa, synthetic construct
GSGSPHSKAHA

SEQ ID NO: 6345 - protein, 11 aa, synthetic construct
GSGSPHSLCLN

SEQ ID NO: 6346 - protein, 11 aa, synthetic construct
GSGSPHSKAFV

SEQ ID NO: 6347 - protein, 11 aa, synthetic construct
GSGSPHRPWQN

SEQ ID NO: 6348 - protein, 11 aa, synthetic construct
GSGSPHRPRQN

SEQ ID NO: 6349 - protein, 11 aa, synthetic construct
GSGSPHSCPQN

SEQ ID NO: 6350 - protein, 11 aa, synthetic construct
GSGSPHSKAQF

SEQ ID NO: 6351 - protein, 11 aa, synthetic construct
GSGSPHSVRYN

SEQ ID NO: 6352 - protein, 11 aa, synthetic construct
GSGSPHSVRCN

SEQ ID NO: 6353 - protein, 11 aa, synthetic construct
GSGSPHSKMPC

SEQ ID NO: 6354 - protein, 11 aa, synthetic construct
GSGSPHSKKTS

SEQ ID NO: 6355 - protein, 11 aa, synthetic construct
GSGSPHSLPYN

SEQ ID NO: 6356 - protein, 11 aa, synthetic construct
GSGSPHVYHQN

SEQ ID NO: 6357 - protein, 11 aa, synthetic construct
GSGSPHSKAQS

SEQ ID NO: 6358 - protein, 11 aa, synthetic construct
GSGSPHSYTRN

SEQ ID NO: 6359 - protein, 11 aa, synthetic construct
GSGSPHLVYQN

SEQ ID NO: 6360 - protein, 11 aa, synthetic construct
GSGSPHYRYQN

SEQ ID NO: 6361 - protein, 11 aa, synthetic construct
GSGSPHSWLKN

SEQ ID NO: 6362 - protein, 11 aa, synthetic construct
GSGSPHSKAQM

SEQ ID NO: 6363 - protein, 11 aa, synthetic construct
GSGSPHCPAQN

SEQ ID NO: 6364 - protein, 11 aa, synthetic construct
GSGSPHSMCTN

SEQ ID NO: 6365 - protein, 11 aa, synthetic construct
GSGSPHSPPDN

SEQ ID NO: 6366 - protein, 11 aa, synthetic construct
GSGSPHSKRNY

SEQ ID NO: 6367 - protein, 11 aa, synthetic construct
GSGSPHRWTQN

SEQ ID NO: 6368 - protein, 11 aa, synthetic construct
GSGSPHSKACR

SEQ ID NO: 6369 - protein, 11 aa, synthetic construct
GSGSPHPRKQN

SEQ ID NO: 6370 - protein, 11 aa, synthetic construct
GSGSPHSKCSV

SEQ ID NO: 6371 - protein, 11 aa, synthetic construct
GSGSPHSKARI

SEQ ID NO: 6372 - protein, 11 aa, synthetic construct
GSGSPHPFVQN

SEQ ID NO: 6373 - protein, 11 aa, synthetic construct
GSGSPHSKLPK

SEQ ID NO: 6374 - protein, 11 aa, synthetic construct
GSGSPHSKSEQ

SEQ ID NO: 6375 - protein, 11 aa, synthetic construct
GSGSPHWVAQN

SEQ ID NO: 6376 - protein, 11 aa, synthetic construct
GSGSPHSLYQN

SEQ ID NO: 6377 - protein, 11 aa, synthetic construct
GSGSPHSKVRM

SEQ ID NO: 6378 - protein, 11 aa, synthetic construct
GSGSPHCALQN

SEQ ID NO: 6379 - protein, 11 aa, synthetic construct
GSGSPHSSCTN

SEQ ID NO: 6380 - protein, 11 aa, synthetic construct
GSGSPHSKNSR

SEQ ID NO: 6381 - protein, 11 aa, synthetic construct
GSGSPHSKRKR

SEQ ID NO: 6382 - protein, 11 aa, synthetic construct
GSGSPHLCTQN

SEQ ID NO: 6383 - protein, 11 aa, synthetic construct
GSGSPHSTCLN

SEQ ID NO: 6384 - protein, 11 aa, synthetic construct
GSGSPHSYARN

SEQ ID NO: 6385 - protein, 11 aa, synthetic construct
GSGSPHSKQRP

SEQ ID NO: 6386 - protein, 11 aa, synthetic construct
GSGSPHSKRVV

SEQ ID NO: 6387 - protein, 11 aa, synthetic construct
GSGSPHKSGQN

SEQ ID NO: 6388 - protein, 11 aa, synthetic construct
GSGSPHSYYSN

SEQ ID NO: 6389 - protein, 11 aa, synthetic construct
GSGSPHSLTCN

SEQ ID NO: 6390 - protein, 11 aa, synthetic construct
GSGSPHSCQSN

SEQ ID NO: 6391 - protein, 11 aa, synthetic construct
GSGSPHSKAKG

SEQ ID NO: 6392 - protein, 11 aa, synthetic construct
GSGSPHSKPQN

SEQ ID NO: 6393 - protein, 11 aa, synthetic construct
GSGSPHFPFQN

SEQ ID NO: 6394 - protein, 11 aa, synthetic construct
GSGSPHSKCTS

SEQ ID NO: 6395 - protein, 11 aa, synthetic construct
GSGSPHSVFEN

SEQ ID NO: 6396 - protein, 11 aa, synthetic construct
GSGSPHSKAKK

SEQ ID NO: 6397 - protein, 11 aa, synthetic construct
GSGSPHGRYQN

SEQ ID NO: 6398 - protein, 4 aa, synthetic construct
SPHK

SEQ ID NO: 6399 - protein, 11 aa, synthetic construct
ERVSGSPHSKA

SEQ ID NO: 6400 - protein, 12 aa, synthetic construct
AEIGHDSPHKSG

SEQ ID NO: 6401 - protein, 11 aa, synthetic construct
EKMSGSPHSKA

SEQ ID NO: 6402 - protein, 11 aa, synthetic construct
HDSPHSKAQNL

SEQ ID NO: 6403 - protein, 11 aa, synthetic construct
VNGHDSPHSKA

SEQ ID NO: 6404 - protein, 27 aa, synthetic construct
KTINGSGQNQQTLKFSVAGPSNMAVQG

SEQ ID NO: 6405 - protein, 12 aa, synthetic construct
KTINGSGQNQQT

SEQ ID NO: 6406 - protein, 8 aa, synthetic construct
GSGQNQQT

SEQ ID NO: 6407 - protein, 9 aa, synthetic construct
  VARIANT 1: note = Any amino acid
  VARIANT 7: note = Any amino acid
  VARIANT 9: note = Any amino acid
XSGSPHXKX

SEQ ID NO: 6408 - protein, 9 aa, synthetic construct
  VARIANT 1: note = Any amino acid
  VARIANT 2: note = A, C, D, E, F, G, H, I, K, L, M, N, P, Q, R, T, V, W or Y
  VARIANT 3: note = A, C, D, E, F, H, I, K, L, M, N, P, Q, R, S, T, V, W or Y
  VARIANT 8: note = Any amino acid
  VARIANT 9: note = Any amino acid
XXXSPHKXX

SEQ ID NO: 6409 - protein, 18 aa, synthetic construct
KIEYGHDSPHKSGQNQQT

SEQ ID NO: 6410 - protein, 18 aa, synthetic construct
KMEWGHDSPHKSGQNQQT

SEQ ID NO: 6411 - protein, 18 aa, synthetic construct
KCEYGHDSPHKSGQNQQT

SEQ ID NO: 6412 - protein, 18 aa, synthetic construct
KMEIGHDSPHKSGQNQQT

SEQ ID NO: 6413 - protein, 18 aa, synthetic construct
KLEYGHDSPHKSGQNQQT

SEQ ID NO: 6414 - protein, 18 aa, synthetic construct
KCDQGHDSPHKSGQNQQT

SEQ ID NO: 6415 - protein, 13 aa, synthetic construct
GSGSPHSKAQNQQ

SEQ ID NO: 6416 - protein, 13 aa, synthetic construct
GSGSPHSKAPNLQ

SEQ ID NO: 6417 - protein, 13 aa, synthetic construct
TSGSPHSKAQNQQ

SEQ ID NO: 6418 - protein, 13 aa, synthetic construct
GSGSPHSKAPNQH

SEQ ID NO: 6419 - protein, 13 aa, synthetic construct
ISGSPHSKAQNQQ

SEQ ID NO: 6420 - protein, 13 aa, synthetic construct
GSGSPHSKAQPAK

SEQ ID NO: 6421 - protein, 13 aa, synthetic construct
SSGSPHSKAQNQQ

SEQ ID NO: 6422 - protein, 13 aa, synthetic construct
GSGSPHSKSQTQQ

SEQ ID NO: 6423 - protein, 13 aa, synthetic construct
ASGSPHSKAQNQQ

SEQ ID NO: 6424 - protein, 13 aa, synthetic construct
GSGSPHSKAQNLA

SEQ ID NO: 6425 - protein, 13 aa, synthetic construct
GSGSPHSKAQGQQ

SEQ ID NO: 6426 - protein, 13 aa, synthetic construct
GSGSPHSKALNRQ

SEQ ID NO: 6427 - protein, 13 aa, synthetic construct
LSGSPHSKAQNQQ

SEQ ID NO: 6428 - protein, 13 aa, synthetic construct
GSGSPHSKAHNQQ

SEQ ID NO: 6429 - protein, 13 aa, synthetic construct
GGGSPHSKAQNQL

SEQ ID NO: 6430 - protein, 13 aa, synthetic construct
GSGSPHSKAQNHQ

SEQ ID NO: 6431 - protein, 13 aa, synthetic construct
GSGSPHSKAQDQQ

SEQ ID NO: 6432 - protein, 13 aa, synthetic construct
GGGSPHSKSQNQL